(19) United States
(12) Patent Application Publication
(10) Pub. No.: US 2009/0077680 A1
(43) Pub. Date: Mar. 19, 2009

(54) Genetically Engineered and Photyped Mice and Stem Cell Clones for Producing the Same

(76) Inventors: Alejandro Abuin, The Woodlands, TX (US); Joel Edwards, Las Flores, CA (US); Charles Montgomery, Jay, OK (US); Bobby Joe Payne, The Woodlands, TX (US); Carolina Rangel, Houston, TX (US); Arthur T. Sands, The Woodlands, TX (US); Zheng-Zheng Shi, The Woodlands, TX (US); Mary Jean Sparks, Magnolia, TX (US); Teresa Gail Townsend, Houston, TX (US); Rosemary Girgis, Houston, TX (US); Allison Anne Byers Horner, Dickinson, TX (US); Peter Vogel, The Woodlands, TX (US); Brian Zambrowicz, The Woodlands, TX (US)

Correspondence Address: LEXICON PHARMACEUTICALS, INC., 8800 TECHNOLOGY FOREST PLACE, THE WOODLANDS, TX, 77381-1160, US

(21) Appl. No.: 12/099,465

(22) Filed: Apr. 8, 2008

Related U.S. Application Data
(63) Continuation of application No. 11/318,121, filed on Dec. 23, 2005, now abandoned.
Application No. 11/318,121 is a continuation-in-part of application No. 10/226,635, filed on Aug. 22, 2002, now abandoned.
Application No. 11/318,121 is a continuation-in-part of application No. 10/256,174, filed on Sep. 26, 2002, now abandoned.
Application No. 11/318,121 is a continuation-in-part of application No. 10/327,713, filed on Dec. 20, 2002, now abandoned.
Application No. 11/318,121 is a continuation-in-part of application No. 10/702,075, filed on Nov. 4, 2003, now abandoned.
Application No. 10/702,075 is a continuation of application No. 09/880,687, filed on Jun. 12, 2001, now abandoned.
Application No. 11/318,121 is a continuation-in-part of application No. 10/834,396, filed on Apr. 28, 2004, now abandoned.
Application No. 10/834,396 is a continuation of application No. 09/941,240, filed on Aug. 28, 2001, now abandoned.
(60) Provisional application No. 60/315,454, filed on Aug. 28, 2001.
(60) Provisional application No. 60/324,927, filed on Sep. 26, 2001.
(60) Provisional application No. 60/343,141, filed on Dec. 20, 2001.
(60) Provisional application No. 60/211,232, filed on Jun. 12, 2000.
(60) Provisional application No. 60/228,532, filed on Aug. 28, 2000.

(51) Int. Cl. A01K 67/027; C12N 5/06; C07K 16/18

(52) U.S. Cl. 800/18; 435/354; 530/387.1; 530/387.3; 530/388.1; 530/389.1

(57) ABSTRACT

The current invention relates to genetically engineered mice, cells derived from those mice, and polynucleotides and polypeptides corresponding to genes affected by the engineered mutation. The invention also relates to antibodies raised in a mouse of the invention. The invention further provides methods for using the mice, cells, polynucleotides, polypeptides and antibodies of the invention.

[0001] This application is a continuation-in-part of U.S. application Ser. No. 10/226,635 filed Aug. 22, 2002, currently pending, which claims the benefit of U.S. Provisional Application Ser. No. 60/315,454 filed Aug. 28, 2001, now abandoned; U.S. application Ser. No. 10/256,174 filed Sep. 26, 2002, currently pending, which claims the benefit of U.S. Provisional Application Ser. No. 60/324,927 filed Sep. 26, 2001, now abandoned; U.S. application Ser. No. 10/327,713 filed Dec. 20, 2002, currently pending, which claims the benefit of U.S. Provisional Application Ser. No. 60/343,141 filed Dec. 20, 2001, now abandoned; U.S. application Ser. No. 10/702,075 filed Nov. 4, 2003, currently pending, which is a continuation of U.S. application Ser. No. 09/880,687 filed Jun. 12, 2001, now abandoned, which claims the benefit of U.S. Provisional Application Ser. No. 60/211,232 filed Jun. 12, 2000, now abandoned; U.S. application Ser. No. 10/834,396 filed Apr. 28, 2004, currently pending, which is a continuation of U.S. application Ser. No. 09/941,240 filed Aug. 28, 2001, now abandoned, which claims the benefit of U.S. Provisional Application Ser. No. 60/228,532 filed Aug. 28, 2000, now abandoned; all of which are incorporated herein by reference.

### 1.0 SUBMISSION ON COMPACT DISC

[0002] The contents of the following submission on compact discs are incorporated herein by reference in their entirety: a compact disc copy of the Sequence Listing (COPY 1) (file name: Lexicon 4317 Listing.txt; date recorded: Dec. 22, 2005; size: 1,810 kilobytes); a duplicate compact disc copy of the Sequence Listing (COPY 2) (file name: Lexicon 4317 Listing.txt; date recorded: Dec. 22, 2005; size: 1,810 kilobytes); and a computer readable form copy of the Sequence Listing (CRF COPY) (file name: Lexicon 4317 Listing.txt; date recorded: Dec. 22, 2005; size: 1,810 kilobytes).

### 2.0 FIELD OF THE INVENTION

[0003] The present invention relates to genotypic and phenotypic analyses of multiple genes in mice for the rapid and efficient development of drugs and therapies. The invention also relates to the individual mutant animal lines and their respective phenotypes, ES cells to generate animals and other cell lines, and antibodies generated in the animals. The massive phenotypic analysis provided by the present invention represents a key breakthrough in making drug development for therapy more efficient and thus faster and more affordable.

### 3.0 BACKGROUND

[0004] The development of new drugs and therapies has traditionally benefited from modeling the disease of interest, typically in a suitable animal species. Species of particular interest share a close evolutional relationship to humans, are physiologically relevant to human disease, are capable of supporting research through short generational cycles, and are scientifically well defined to generate consistent and meaningful data of disease phenotype and physiology of drug effects. For over a century, mice have been recognized as highly suited for drug development.

[0005] Where animal models for disease are sought, they can be obtained by observing phenotypes in animals to find a naturally occurring variant that mimics the pathology of a disease of interest as closely as possible. Ideally, such a variant would be the result of a naturally occurring mutation so that the animal could be propagated for research. Yet, the likelihood of finding such animal models is small and only a limited number of desirable animal models for diseases of interest have been identified this way.

[0006] New ways of generating mouse variants resulted from technologies for engineering mutations into the genome of mice. These technologies facilitate the introduction of changes into the mouse genome, either through random or targeted events. Of particular value is site specific mutagenesis of the mouse genome, especially when combined with the genetic and phenotypic characterization of the resulting mouse variant. Site specific mouse mutants have provided valuable insights that have been key in improved allocation of drug development efforts and thus saved valuable time and ultimately lives.

[0007] Expanding the number of mouse variants with engineered depletion of genomic function would provide additional opportunities for more efficient drug development for therapy. Particularly desirable would be a bank of mouse mutants, each representing a depletion of a particular genomic function, each being characterized as to the specific site of the mutation and the gene affected, and each mutant being characterized on the homozygote, heterozygote, and wild-type level for a number of different physiological parameters for quick identification of most desirable phenotypes for multiple types of diseases. Such a bank of mouse mutants would be especially useful if it included functional depletions for most genes in the mouse genome as that would substantially increase the probability of obtaining a mouse mutant with a phenotype specific for many diseases of interest.

[0008] The present invention provides such a bank of mouse mutants in certain embodiments. More specifically, the present invention provides a bank of multiple mutant mouse lines, representing functional depletions of many genes of the mouse genome, all genetically and phenotypically characterized.

### 4.0 SUMMARY OF THE INVENTION

[0009] The present invention provides in certain embodiments a library or bank of mice (mouse library), each mouse comprising a mutation engineered into its genome, and in certain preferred embodiments, each mouse of the library comprises an engineered mutation that is distinct from the mutation engineered into the other mice of the library (distinct engineered mutation). In certain preferred embodiments, a mouse library according to the invention comprises at least 50 mice with each carrying a distinct engineered mutation, and more preferably at least 100 mice, 1,000 mice, 10,000 mice, or 50,000 mice, each library comprising mice carrying a distinct engineered mutation. The current invention also comprises individual mice and mouse lines carrying an engineered mutation.

[0010] In certain preferred embodiments, a mouse library of the current invention comprises mice that can be bred to be heterozygous and/or homozygous for the engineered mutation. In certain other preferred embodiments, a mouse library of the current invention comprises mice that have been characterized as to the engineered mutation, changes in gene expression, and the phenotype of the mice, preferably heterozygous and homozygous for the engineered mutation. In certain embodiments, the current invention provides animal models for drug development. For example, a mouse of the current invention, in certain embodiments, lacks a genomic function and said function is linked to phenotypic traits affiliated with one or more diseases.

[0011] The invention further comprises cells, for example, an embryonic stem cell (ES cell), a fibroblast, a nerve cell, a muscle cell, any cell derived from an ES cell of the invention. In certain embodiments, a cell of the invention carries an engineered mutation.

[0012] In certain other embodiments, the current invention provides antibodies, and in certain preferred embodiments, antibodies generated using a mouse of the invention.

### 5.0 BRIEF DESCRIPTION OF THE DRAWINGS

[0013] FIGS. 1-18: Each figure presents one of gene trap vectors VICTR21, VICTR22, VICTR23, VICTR24, VICTR25, VICTR30, VICTR31, VICTR32, VICTR37, VICTR40, VICTR41, VICTR44, VICTR48, VICTR48 MTII, VICTR49, VICTR54, VICTR628, and VICTR743. The total length of each vector is provided in nucleotides. Abbreviations followed by an arabic number represent restriction enzymes and the number constitutes the number of the nucleotide in the vector at which the enzymes are capable of cutting the vector. Enzymes with an asterix at the number can cut the vector only at a single site. Non-cutters are enzymes that cannot cut the vector at any site. Sequence elements of the vector are abbreviated as follows. Where a sequence element is written upside down, it means the orientation of the element is reversed. LTR is a modified (deleted enhancer) long terminal repeat from Moloney murine leukemia virus; SA is a splice acceptor; SA-TM is a splice acceptor-transmembrane domain for trapping secreted proteins more effectively (allowing the fusion protein resulting from genomic and vector sequences to be retained intracellularly); frt is FRT recombinase; IRES is an internal ribosome entry site from EMCV (encephalomyocarditis virus); BGEO (or βGEO) is a fusion of betagalactosidase and neomycin (neo) resistance gene; pA is a SV40 gene polyadenylation signal sequence; PGK is a phosphoglycerate kinase promoter from mouse phosphoglycerate kinase-1 gene; BTK is a mouse Bruton agammaglobulinemia tyrosine kinase gene, first non-coding exon; PURO is a puromycin resistance gene coding sequence that lacks a polyadenylation sequence; SD is a splice donor sequence from mouse BTK first exon; NEO is a neomycin resistance gene; Gastrin is the first exon of the gastrin gene; SV40tpA is a concatenated triple polyadenylation signal from the major viral coat protein 1 gene of the SV40 virus; BGlobinTerm is a transcriptional terminator that operates in opposite direction of viral transcription; CRE is cre recombinase; MTII pA is a 530 base pair segment that includes the last two exons, with intervening intron, of the mouse metallothionein 2 gene and its polyadenylation signal.

### 6.0 DETAILED DESCRIPTION OF THE INVENTION

[0014] The present invention describes libraries of mice carrying engineered mutations affecting multiple genes and facilitating efficient drug development for therapy. The present invention provides mouse libraries, individual lines of mice comprising the described mouse libraries, ES cells to generate mice and other cell types specific for the mice of the libraries. The invention also comprises other compositions and methods related to the mouse libraries and ES cells described herein.

### 6.1 Mouse Libraries of the Current Invention

[0015] A mouse library of the invention preferably comprises a collection of mice and, more preferably, mice of said collection have an engineered genomic mutation. A collection of mice comprising a mouse library of the invention, in certain embodiments, comprises at least 50 mice, or at least 100 mice, at least 200 mice, at least 300 mice, at least 400 mice, at least 500 mice, at least 750 mice, at least 1000 mice, at least 2500 mice, at least 5000 mice, at least 7500 mice, at least 10000 mice, at least 25000 mice, at least 50000 mice, or at least 100000 mice. The mice in a collection of mice of the invention, in certain preferred embodiments, comprise an engineered genomic mutation. A collection of mice of the present invention, in certain embodiments, comprises at least 50 different engineered genomic mutations, or at least 100, at least 200, at least 300, at least 400, at least 500, at least 750, at least 1000, at least 2500, at least 5000, at least 7500, at least 10000, at least 25000, at least 50000, or at least 100000 engineered genomic mutations.

[0016] A mouse of a mouse library of the invention, in certain embodiments, may be of any strain, or of a mixture of strains, or a chimera, or a derivative of one or more strains. Examples of mouse strains are 129, Black 6, C57BL/6, CD-1. See, for example, U.S. Pat. Nos. 6,878,542; 6,815,185 for mouse strains, all of which are incorporated herein by reference for all purposes. A listing of various mouse strains is provided in “Genetic Variants and Strains of the Laboratory Mouse” 3rd Ed., Vols. 1 and 2, 1996, Lyon et al., eds., Oxford University Press, NY, N.Y., herein incorporated by reference in its entirety. The mouse may be a female or male mouse, a young mouse, an adult mouse, a mouse with a known phenotype or an unknown phenotype, a mouse with a known genotype or an unknown genotype.

[0017] An engineered mutation in a mouse of a library of the current invention affects the genome in the nucleus of the cells of the mice. An engineered mutation, in certain embodiments, comprises any one, two, three, four, five or more of an insertion, a deletion, a replacement, an inversion, a truncation, a point mutation, a translocation, a duplication, an amplification, a recombination, and/or any other kind of alteration of the genome. A mutation may, in certain embodiments, affect, change, disturb or alter the structure of the genome of a mouse, or the function of the genome, or both. A mutation may affect, change, disturb or alter the genome of a mouse, a chromosome, a gene, a promoter, an enhancer, a telomere, an intron, an exon, a splice site, an untranscribed region, an untranslated region, a transcribed region, a translated region, a transcription initiation site, a translation initiation site, a termination codon, a polyadenylation signal, a centromer, or any other structure or element found in the genome. A mutation may comprise, in certain embodiments, an engineered or recombinant polynucleotide of at least 500 base pairs, at least 1000 base pairs, at least 2000 base pairs, at least 5000 base pairs, at least 10000 base pairs, or at least 20000 base pairs.

[0018] An engineered genomic mutation of the current invention, in certain embodiments, comprises a mutation that is caused through human influence or intervention. For example, any human effort that increases the probability of a mutation is contemplated. In certain preferred embodiments, an engineered genomic mutation results from an assay or technique known in the field of biotechnology, molecular biology or genetic engineering, or any other discipline engaged in the manipulation of a mammalian genome. Where a mutation is engineered into the genome of a cell or an animal, off-spring of said cell or animal are also contemplated as carrying said engineered genomic mutation.

[0019] A mouse library of the current invention may be maintained, kept or stored, in certain embodiments, as a collection of living animals, a collection of ES cells, a collection of eggs, a collection of fertilized eggs, a collection of gametes, a collection of morulae, a collection of blastocysts, a collection of embryos, a collection of oocytes, a collection of fetuses, or a collection of cells of any cell type or cell aggregate that is capable of generating a mouse. Such a collection would comprise, in certain embodiments, each engineered genomic mutation so that a mouse of each mouse line of the mouse library may be generated. A mouse library of the current invention may be stored, in certain embodiments, through cryopreservation. In certain embodiments, cryopreservation is not used to store a living animal. Methods for cryopreservation useful to store a mouse library of the current invention are known in the art and are described, for example, in U.S. Pat. Nos. 5,962,213; 6,361,934; 6,500,608; 6,503,698; 6,519,954; and in Van den Abbeel et al., 1994, Cryobiology 31(5):423-33; Dumoulin et al, 1994, Fertil Steril. 62(4):793-8; Vasuthevan et al., 1992, J. Assist. Reprod. Genet. 9(6):545-50; Thornton et al., 1999, Mamm. Genome 10(10):987-92; Songsasen and Leibo, 1997, Cryobiology 35(3):255-69; Songsasen and Leibo, 1997, Cryobiology 35(3):240-54; Songsasen et al., 1997, Biol. Reprod. 56(1):143-52; Critser and Mobraaten, 2000, ILAR J. 41(4):197-206; Kasai and Mukaida, 2004, Reprod. Biomed. Online 9(2):164-170; Menezo, 2004, Obstet. Gynecol. Reprod. Biol. 115 Suppl 1:S12-5; Sztein et al, 2001, Cryobiology 42(1):28-39; Sztein et al., 1999, Lab.-Anim.-Sci. 49(1):99-100; Sztein et al., 1998, Biol.-Reprod. 58(4): 1071-4, all of which are incorporated herein by reference for all purposes.

[0020] Mutations and ways of engineering mutations into a mouse genome are also described in U.S. Patent Application Nos. 20020182724, 20040072243, 20040259253, 20050059060, 20050053953; and in U.S. Pat. Nos. 6,080,576; 6,136,566; 6,207,371; 6,218,123; 6,436,707; 6,776,988; 6,808,921; 6,855,545, all of which are incorporated herein by reference for all purposes.

### 6.1.1 Generating Mouse Libraries of the Current Invention

[0021] A mouse library of the current invention, in certain embodiments, is generated by engineering a genomic mutation into a plurality of mice. A genomic mutation is engineered into a mouse, in certain embodiments, by engineering said mutation into a cell, and preferably into a cell that is useful to generate a mouse. In certain embodiments, a mutation is engineered into a gamete, a fertilized egg, a stem cell, an embryonic stem cell, a hematopoietic stem cell, or any other type of cell useful for generating a mouse. Examples of cell lines useful for generating a mouse include AB 2.2, HES-1, J1, CGR-8, R1, E14.1, E14TG2a. See, for example, U.S. Pat. Nos. 6,875,607; 6,867,035; 6,878,542; 6,815,185; 6,884,622 for cell lines, all of which are incorporated herein by reference for all purposes.

[0022] A genomic mutation, in certain embodiments, is engineered by introducing an oligonucleotide or a polynucleotide into a cell that is useful to generate a mouse. A useful nucleotide, oligonucleotide, or polynucleotide may be naturally occurring or not naturally occurring. In certain preferred embodiments, DNA, RNA, or any kind of derivative of either one, is introduced into a cell useful to generate a mouse. A DNA or RNA, or derivative of either, useful for introduction into a cell, in certain embodiments, is a vector, a virus, a construct, a replacement vector, an integration vector, a linear molecule, a circular molecule. A polynucleotide useful for engineering a genomic mutation into a cell, in certain embodiments, comprises one, two, three, or more of a marker, a marker facilitating the survival of a cell, a marker facilitating the killing of a cell, a stretch of genomic sequence, a splice donor site, a splice acceptor site, a multi-cloning site, a poly-adenylation signal, a transcription initiation site, a translation initiation site, an intron, an exon, vector sequences or any other element desired for engineering a desired genomic mutation. A stretch of genomic sequence may, in certain embodiments, have a length of 0 to 1 million bases, or 0.5 to 2 million bases, 0.2 to 20.0 kilobases, 0.2 to 5.0 kilobases, or 1.0 to 10.0 kilobases. Examples of vectors are Bluescript, pUC, or any other vector that facilitates the cloning, manipulation, sequencing, identification, isolation, amplification, and/or purification of a polynucleotide. See, for example, U.S. Pat. Nos. 6,815,185; 6,884,622 for background on designing, manipulating and cloning polynucleotides, all of which are incorporated herein by reference for all purposes.

[0023] In certain embodiments, a genomic mutation of the current invention is engineered by introducing a vector as shown in one or more of FIGS. 1 through 18 into a mouse cell, for example, an embryonic stem cell. A vector as shown in each of FIGS. 1 through 18 is referred to as a gene trap vector. In certain preferred embodiments, a gene trap vector may integrate into a gene in the genome of a cell. In certain other preferred embodiments, the integration of a gene trap vector into a gene results in a transcript from that gene comprising vector sequences and gene sequences (hybrid transcript). In certain other preferred embodiments, a hybrid transcript results from a gene with an integrated gene trap vector after transcription of the gene and before and following splicing of the transcript. Elements of gene trap vectors useful for making a mouse or cell of the current invention are known to those of skill in the art, for example, a mouse PGK promoter is discussed in Adra et al., 1987, Gene 60(1):65-74; a mouse BTK sequence is discussed in Sideras et al., 1994, J. Immunol. 153(12):5607-17; an SABgeo sequence and a splice acceptor sequence from adenovirus are discussed in Friedrich and Soriano, 1991, Genes Dev. 5(9):1513-23; a pGen (MoMuLV backbone) sequence is discussed in Soriano et al., 1991, J. Virol. 65(5):2314-9; a bGH polyadenylation sequence and a SV40 polyadenylation sequence are discussed in Pfarr et al., 1986, DNA 5(2):115-22, a polyadenylation signal from the major viral coat protein 1 gene of the SV40 virus is discussed in Maxwell et al, 1989, Biotechniques. 7(3):276-80, all of which are incorporated by reference.

[0024] In certain other preferred embodiments, a mutation is engineered into a cell that is maintained in culture or any environment that allows the manipulation of large numbers of cells and that allows the screening and identification of cells with desired characteristics, for example, cells that comprise an engineered genomic mutation of interest. In certain other embodiments, cells are maintained, grown, manipulated, screened and/or identified using one, two, three, four, or more different cultures, media, environments, buffers, sera, salts, and supports. See, for example, U.S. Pat. Nos. 6,875,607; 6,878,542; 6,815,185 for background on tissue culture, all of which are incorporated herein by reference for all purposes.

[0025] In certain other embodiments, a genomic mutation is engineered into a mouse by introducing said mutation into the cells of a mouse. For example, an oligonucleotide or a polynucleotide may be introduced into the cells of a mouse by any means capable of such delivery, for example, a virus, a liposome or any other means known in the art.

[0026] Background on generating a mouse library, including cloning, tissue culture, mutagenesis and generating mice, is also described in U.S. Patent Application Nos. 20020182724, 20040072243, 20040259253, 20050059060, 20050053953; and in U.S. Pat. Nos. 6,080,576; 6,136,566; 6,207,371; 6,218,123; 6,436,707; 6,776,988; 6,808,921; 6,855,545, all of which are incorporated herein by reference for all purposes.

### 6.1.2 Characterizing Mice of the Libraries of the Current Invention

[0027] Mice of a library of the current invention, in certain embodiments, are characterized by analyzing mouse lines comprising said library. A mouse line, in certain embodiments, consists of mice that are related as off-spring. In certain other embodiments, a mouse line consists of mice that comprise the same engineered genomic mutation. A mouse line, in certain embodiments, comprises mice that are homozygous or heterozygous for the same engineered genomic mutation, mice that are chimeras comprising cells that comprise that same engineered genomic mutation, and mice that are off-spring (or progeny) of such homozygotes, heterozygotes or chimeras, including wild-type off-spring that does not carry the same engineered genomic mutation. A mouse of each of these aforementioned types that is part of a mouse line of the invention is referred to herein as Homozygote, Heterozygote, Chimera, Off-Spring or Wild-Type. In certain embodiments, at least 50 percent of all mouse lines comprising a library of the invention are characterized, in certain other preferred embodiments, at least 75 percent or all mouse lines of such a library are characterized.

[0028] A mouse line of the present invention, in certain embodiments, is characterized by analyzing a Homozygote, a Heterozygote, a Chimera, an Off-Spring, and a Wild-Type of said mouse line, or any one, two, three or four thereof. In certain embodiments, at least one Homozygote, one Heterozygote and one Wild-Type mouse is analyzed, or at least two of each of the three types, at least three, at least four, at least five, at least eight, at least ten, or at least twenty. A mouse is characterized, in certain embodiments, by analyzing any aspect of the mouse or relating to the mouse. In certain embodiments, a mouse is characterized by analyzing all or a part of its structure, function, anatomy, physiology, genetics, genome, gene expression, cell growth, tumorigenesis, development, embryology, behavior, movement, susceptibility to disease, life span, weight, skeleton, or any other aspect of the mouse. A Homozygote or Heterozygote mouse of the current invention is characterized by at least identifying a gene affected by an engineered genomic mutation of said mouse.

### 6.1.2.1 Genetic Analysis

[0029] A mouse of the invention, in certain embodiments, is analyzed genetically. A preferred genetic analysis comprises determining or identifying any change or changes in the genome of a mouse comprising an engineered genomic mutation when compared to a mouse that does not comprise such a mutation. A genetic analysis, according to certain embodiments, comprises identifying a part of the genome affected by the engineered mutation, isolating a part of the genome comprising the engineered mutation, cloning a part of the genome comprising the engineered mutation, sequencing DNA, sequencing RNA, performing a restriction analysis, determining the site where an exogenous polynucleotide integrated into the genome, determining the presence of a rearrangement of parts of the genome, determining if a part of the genome has been deleted, determining if a part of the genome has been multiplied, determining if a part of the genome has been modified, or determining if any other kind of change has occurred to the genome of a mouse of the invention. See, for example, U.S. Pat. Nos. 6,875,607; 6,867,035; 6,878,542; 6,815,185; 6,884,622 for background on cloning.

[0030] Background on genetic analysis is also described in U.S. Patent Application Nos. 20020182724, 20040072243, 20040259253, 20050059060, 20050053953; and in U.S. Pat. Nos. 6,080,576; 6,136,566; 6,207,371; 6,218,123; 6,436,707; 6,776,988; 6,808,921; 6,855,545, all of which are incorporated herein by reference for all purposes.

### 6.1.2.2 Transcriptional Analysis

[0031] A mouse of the invention, in certain embodiments, is analyzed by performing a transcriptional analysis. A transcriptional analysis, according to certain embodiments, comprises determining the activity of any part of the genome of a mouse, for example, the activity of one or more genes. A transcriptional analysis, according to certain embodiments, comprises determining the quantity, stability, structure, location, sequence, modification, binding, or folding of RNA, for example, mRNA, hnRNA, tRNA, rRNA, or any other kind of RNA.

[0032] A transcriptional analysis comprises, in certain preferred embodiments, identifying an RNA molecule found in a mouse carrying the engineered genomic mutation but not in a mouse of the same strain not carrying that mutation (“mutated RNA”). In certain embodiments, a mutated RNA results from transcription of a part of the genome altered by the engineered genomic mutation, for example, if the engineered mutation resulted in the insertion of an exogenous sequence into an exon of a gene, transcription of that gene would result in an RNA molecule that includes the exogenous sequence. Or, for example, where the engineered mutation inserts exogenous exon sequences and one or more splice sites into a gene (for example, an exogenous exon with a splice acceptor site upstream and a splice donor site downstream may integrate into an intron) transcription of that gene would result in an RNA molecule that includes the exogenous exon sequences and the splice sites (“mutated hnRNA”). A mutated hnRNA, in certain embodiments, would undergo splicing to yield mature RNA molecules found in a mouse with an engineered genomic mutation (“mutated mRNA”) but not in a Wild-Type mouse (for example, the mutated mRNA would include an exogenous exon sequence that is not found in mRNA resulting from the non-mutated gene).

[0033] Background on transcriptional analysis is also described in U.S. Patent Application Nos. 20020182724, 20040072243, 20040259253, 20050059060, 20050053953; and in U.S. Pat. Nos. 6,080,576; 6,136,566; 6,207,371; 6,218,123; 6,436,707; 6,776,988; 6,808,921; 6,855,545, all of which are incorporated herein by reference for all purposes.

### 6.1.2.3 Phenotypic Analysis

[0034] A mouse of the invention, in certain embodiments, is analyzed by performing a phenotypic analysis. A phenotypic analysis, according to certain embodiments, comprises an assessment or evaluation of the behavior, coat color, size, proportions, shape, skeleton, reflexes, blood, blood protein, blood composition, cholesterol level, life span, weight, organ size, organ shape, organ function, brain size, or any other phenotypic aspect.

### 6.1.2.4 Computational Analysis

[0035] A mouse of the invention, in certain embodiments, is analyzed by performing a computational analysis. A computational analysis, according to certain embodiments, comprises a comparison of data derived from a mouse, a mouse line or a mouse library of the current invention with data known in the art. In certain other embodiments, a computational analysis comprises a comparison of data derived from a mouse or a mouse line of the current invention with data obtained from another mouse or mouse line of the current invention.

[0036] A computational analysis, in certain embodiments, comprises a comparison of genomic data, sequence data, expression data, phenotypic data, behavioral data, and any other kind of data.

### 6.2 Mice of the Current Invention

[0037] The current invention provides, in certain embodiments, a mouse carrying an engineered genomic mutation and, in certain other embodiments, the current invention provides a mouse line of the mice of the current invention. A mouse of the current invention, in certain embodiments, may be a Homozygote, a Heterozygote, a Chimera, an Off-Spring or a Wild-Type.

[0038] A mouse of the current invention may be maintained, kept or stored, in certain embodiments, as a living animal, an ES cell, an egg, a fertilized egg, a gamete, a morula, a blastocyst, an embryo, an oocyte, a fetus, or a cell of any cell type or cell aggregate that is capable of generating a mouse. A mouse of the current invention may be stored, in certain embodiments, through cryopreservation. In certain embodiments, cryopreservation is not used to store a living animal. Methods for cryopreservation useful to store a mouse of the current invention are known in the art and are described, for example, in U.S. Pat. Nos. 5,962,213; 6,361,934; 6,500,608; 6,503,698; 6,519,954; and in Van den Abbeel et al, 1994, Cryobiology 31(5):423-33; Dumoulin et al., 1994, Fertil Steril. 62(4):793-8; Vasuthevan et al., 1992, J. Assist. Reprod. Genet. 9(6):545-50; Thornton et al., 1999, Mamm. Genome 10(10):987-92; Songsasen and Leibo, 1997, Cryobiology 35(3):255-69; Songsasen and Leibo, 1997, Cryobiology 35(3):240-54; Songsasen et al., 1997, Biol. Reprod. 56(1):143-52; Critser and Mobraaten, 2000, ILAR J. 41(4):197-206; Kasai and Mukaida, 2004, Reprod. Biomed. Online 9(2):164-170; Menezo, 2004, Obstet. Gynecol. Reprod. Biol. 115 Suppl 1:S12-5; Sztein et al., 2001, Cryobiology 42(1):28-39; Sztein et al., 1999, Lab.-Anim.-Sci. 49(1):99-100; Sztein et al., 1998, Biol.-Reprod. 58(4):1071-4, all of which are incorporated herein by reference for all purposes.

[0039] Table 1 shows examples of mice carrying engineered genomic mutations of the current invention. Table 1 also includes a description of the phenotype of a mouse carrying each of the engineered genomic mutations in Table 1.

[0040] Background on mice is also described in U.S. Patent Application Nos. 20020182724, 20040072243, 20040259253, 20050059060, 20050053953; and in U.S. Pat. Nos. 6,080,576; 6,136,566; 6,207,371; 6,218,123; 6,436,707; 6,776,988; 6,808,921; 6,855,545, all of which are incorporated herein by reference for all purposes.

### 6.3 Cells of the Current Invention

[0041] The current invention further includes, in certain embodiments, cells carrying an engineered genomic mutation. A cell of the current invention includes, in certain embodiments, a stem cell, an embryonic stem cell, a hematopoietic stem cell, a progenitor cell, a fibroblast, a nerve cell, a muscle cell, an epithelial cell, a teratocarcinoma cell, any other cell type known in the art, a cell that is progeny of one of the mentioned cell types, a cell that is derived from one of the mentioned cell types through differentiation.

[0042] A cell of the current invention may be obtained, in certain embodiments, by engineering a mutation into the genome of such a cell, for example, a stem cell or an embryonic stem cell. A cell of the current invention may also be obtained, in certain embodiments, from a mouse of the current invention, for example, from a Homozygote, a Heterozygote, an Off-Spring, a Chimera, or a Wild-Type. In certain other embodiments, a cell of the current invention is progeny of a cell obtained from a mouse of the current invention, for example, from a Homozygote, a Heterozygote, an Off-Spring, a Chimera, or a Wild-Type.

[0043] Background on cells is also described in U.S. Patent Application Nos. 20020182724, 20040072243, 20040259253, 20050059060, 20050053953; and in U.S. Pat. Nos. 6,080,576; 6,136,566; 6,207,371; 6,218,123; 6,436,707; 6,776,988; 6,808,921; 6,855,545, all of which are incorporated herein by reference for all purposes.

### 6.4 Polynucleotides of the Current Invention

[0044] The current invention provides, in certain embodiments, a polynucleotide. In certain embodiments, a polynucleotide of the current invention is derived from a cell or a mouse of the current invention. In certain other embodiments, a polynucleotide of the current invention comprises one, more than one, or all exons and/or one, more than one, or all introns of a gene that is found in a Wild-Type of a mouse line of the current invention and that carries an engineered genomic mutation in a Homozygote of the same mouse line, or its complementary, or a fragment thereof, or a polynucleotide capable of hybridizing thereto under conditions of moderate stringency or high stringency. A polynucleotide of the current invention, in certain embodiments, encodes a polypeptide of the current invention. A polynucleotide of the current invention may be DNA, RNA or any modification or derivative thereof. A polynucleotide may be genomic DNA, cDNA, hnRNA, mRNA, or any combination thereof. A polynucleotide of the current invention is at least 50 base pairs in length, or at least 100 base pairs, or at least 200 base pairs, or at least 300 base pairs, or at least 400 base pairs, or at least 500 base pairs, or at least 1000 base pairs, or at least 2000 base pairs, or at least 5000 base pairs, or at least 10000 base pairs, or at least 20000 base pairs in length.

[0045] The identification, isolation, cloning, modification and other processing of polynucleotides and conditions for hybridization under various conditions, including moderate and high stringency, are described in United States Patent Application Number 20050059060, which is incorporated herein for that and any other purpose.

### 6.5 Polypeptides of the Current Invention

[0046] The current invention provides, in certain embodiments, a polypeptide. In certain embodiments, a polypeptide of the current invention is derived from a cell or a mouse of the current invention. In certain other embodiments, a polypeptide of the current invention comprises a polypeptide that is encoded by one, more than one, or all exons of a gene that is found in a Wild-Type of a mouse line of the current invention and that carries an engineered genomic mutation in a Homozygote of the same mouse line, or a fragment thereof. In certain other embodiments, a polypeptide of the current invention is encoded by a polynucleotide of the current invention. A polypeptide of the current invention may comprise any one or more or all of the naturally occurring amino acids, or any modification or derivative thereof. A polypeptide of the current invention is at least 10 amino acids in length, or at least 25 amino acids, or at least 50 amino acids, or at least 100 amino acids, or at least 200 amino acids, or at least 300 amino acids, or at least 500 amino acids in length.

[0047] The identification, isolation, modification and other processing of polypeptides are described in United States Patent Application Number 20050059060, which is incorporated herein for that and any other purpose.

### 6.6 Antibodies of the Current Invention

[0048] The current invention also provides antibodies. In certain embodiments, an antibody of the present invention is specific to an antigen or epitope which is absent in a mouse of the invention (Absent Antigen). In certain preferred embodiments, an Absent Antigen is absent in a Homozygote of a mouse line of the invention, but not absent in a Wild-Type of the same mouse line. In certain other embodiments, an Absent Antigen is synthesized in a cell of a Wild-Type of a mouse line of the invention, but not in a Homozygote of the same mouse line. In certain embodiments, an Absent Antigen is expressed by a gene in a Wild-Type of a mouse line of the invention but not a Homozygote of the same mouse line. In certain other embodiments, an Absent Antigen is encoded by a gene in a Wild-Type of a mouse line of the invention but not a Homozygote of the same mouse line.

[0049] In certain other embodiments, an antibody of the invention is raised in a mouse of the invention, for example, a Wild-Type, a Chimera, an Off-Spring, a Heterozygote, and preferably a Homozygote. In certain other embodiments, an antibody of the current invention may be changed or altered into another antibody type. For example, a mouse antibody may be altered into a humanized antibody with the same antigen specificity, or any other type of alteration may be carried out. Antibody types contemplated under the current invention include, but are not limited to, polyclonal, monoclonal, multispecific, human, humanized or chimeric antibodies, single chain antibodies, Fab fragments, F(ab′) fragments, fragments produced by a Fab expression library, anti-idiotypic (anti-Id) antibodies (including, e.g., anti-Id antibodies to antibodies of the invention), and epitope-binding fragments of any of the above. In certain embodiments, an antibody of the current invention binds an Absent Antigen with a binding affinity (Kₐ) of 10⁶ M⁻¹ or greater, preferably 10⁷ M⁻¹ or greater, more preferably 10⁸ M⁻¹ or greater, more preferably 10⁹ M⁻¹ or greater, more preferably 10¹⁰ M⁻¹ or greater, more preferably 10¹¹ M⁻¹ or greater, and most preferably 10¹² M⁻¹ or greater.

[0050] Background on antibodies, antibody generation, characterization, modification, and uses are also described in U.S. Patent Application Nos. 20020182724, 20040072243, 20040259253, 20050059060, 20050053953; and in U.S. Pat. Nos. 6,080,576; 6,136,566; 6,207,371; 6,218,123; 6,436,707; 6,776,988; 6,808,921; 6,855,545; 6,824,780; 6,827,934; 6,824,993; 6,767,541; 6,828,425, all of which are incorporated herein by reference for all purposes.

### 6.7 Therapeutic Utility

[0051] The present invention provides, in certain embodiments, efficient drug development or development of therapies, or both. A mouse or a cell of the present invention may be used to obtain drugs and therapies for treatment of disease. An antibody of the present invention, in certain embodiments, may be used for therapeutic applications. Therapeutic applications, for example of antibodies of the invention, include disease phenotypes and phenotypic traits as those shown in Table 1.

### 6.8 Diagnostic Utility

[0052] The present invention provides, in certain embodiments, diagnostic tools. For example, a mouse or a cell of the present invention may be used, in certain embodiments, to diagnose the effectiveness of drugs, antibodies, or small molecules. An antibody of the present invention may be used, for example, to diagnose the presence or quantity of an antigen or epitope that the antibody is specific for, or a disease condition associated with a phenotype found in the animal in which the antibody is raised.

[0053] The present invention is further illustrated by the following examples, which are not intended to be limiting in any way whatsoever.

### EXAMPLES

### Example 1

### Generation of a Library of Mutated Mouse ES Cells Defined By GTS Sequences

[0054] Retroviral vectors such as those exemplified and described in detail in U.S. Pat. Nos. 6,080,576, 6,136,566, 6,139,833 were used to generate a collection of gene trapped ES cell clones. Plasmids containing various VICTR cassettes described above were constructed by conventional cloning techniques. Usually, the cassettes contained a PGK promoter directing transcription of an exon that ends in a canonical splice donor sequence. The transcript encoding the exon was engineered to contain sequences that allow for the annealing of two nested PCR and sequencing primers. The vector backbone was based on pBluescript KS+from Stratagene Corporation.

[0055] The plasmid construct was linearized by digestion with, for example, ScaI, which cuts at a unique site in the plasmid backbone. The plasmid was then transfected into the mouse ES cell line AB2.2 by electroporation using a BioRad Genepulser apparatus. After the cells were allowed to recover, gene trap clones were selected by adding puromycin to the medium at a final concentration of 3 μg/ml (other antibiotics, such as G418, were used at suitable concentrations as applicable). Positive clones were allowed to grow under selection for approximately 10 days before being removed and cultured separately for storage and to determine the sequence of the disrupted gene.

[0056] Total RNA was isolated from an aliquot of cells from each of 18 gene trap clones chosen for study. Five micrograms of this RNA was used in a first strand cDNA synthesis reaction using the “RS” primer. This primer has unique sequences (for subsequent PCR) on its 5′ end and nine random nucleotides or nine T (thymidine) residues on it's 3′ end. Reaction products from the first strand synthesis were added directly to a PCR with outer primers specific for the engineered sequences of puromycin and the “RS” primer. After amplification, aliquots of reaction products were subjected to a second round of amplification using primers internal, or nested, relative to the first set of PCR primers. This second amplification provided more reaction product for sequencing and also provided increased specificity for the specifically gene trapped DNA.

[0057] The products of the nested PCR were visualized by agarose gel electrophoresis, and seventeen of the eighteen clones provided at least one band that was visible on the gel with ethidium bromide staining. Most gave only a single band, which is an advantage in that a single band is generally easier to sequence. The PCR products were sequenced directly after excess PCR primers and nucleotides were removed by filtration in a spin column (Centricon-100, Amicon). DNA was added directly to dye terminator sequencing reactions (purchased from ABI) using the standard M13 forward primer, a region for which was built into the end of the puro exon in all of the PCR fragments.

[0058] Subsequent studies have used both VICTR 3, VICTR 20 and follow-on vectors. Like VICTR 3, VICTR 20 is exemplary of a broader family of vectors that incorporate two main functional units: a sequence acquisition component having a strong promoter element (phosphoglycerate kinase 1) active in ES cells that is fused to the puromycin resistance gene coding sequence that lacks a polyadenylation sequence but is followed by a synthetic consensus splice donor sequence (PGKpuroSD); and 2) a mutagenic component that incorporates a splice acceptor sequence fused to a selectable, calorimetric marker gene and followed by a polyadenylation sequence (for example, SAβgeopA or SAIRESβgeopA). Also like VICTR 3, stop codons have been engineered into all three reading frames in the region between the 3′ end of the selectable marker and the splice donor site.

[0059] When VICTRs 3, 20, and various variations and modifications thereof were used in the commercial scale application of the presently disclosed invention; many mutagenized ES cell clones were rapidly engineered and obtained. Sequence analysis obtained from these clones has identified a wide variety of both previously identified and novel sequences.

[0060] The cloned 3′ RACE products resulting after the target ES cells were infected with VICTR 20 were purified using conventional column chromatography (e.g., S300 and G-50 columns), and the products were recovered by centrifugation. Purified PCR products were quantified by fluorescence using PicoGreen (Molecular Probes, Inc., Eugene Oreg.) as per the manufacturer's instructions.

[0061] Dye terminator cycle sequencing reactions with AmpliTaq® FS DNA polymerase (Perkin Elmer Applied Biosystems, Foster City, Calif.) were carried out using approximately 7 pmoles of sequencing primer, and approximately 30-120 ng of 3′ template. Unincorporated dye terminators were removed from the completed sequencing reactions using G-50 columns as described above. The reactions were dried under vacuum, resuspended in loading buffer, and electrophoresed through a 6% Long Ranger acrylamide gel (FMC BioProducts, Rockland, Me.) on an ABI Prism® 377 with XL upgrade as per the manufacturer's instructions. The sequences of the resulting amplicons, or GTSs, were recorded.

### Example 2

### Transfecting ES Cells

[0062] a. Vector Construction

[0063] The promoter from the mouse phosphoglycerate kinase (PGK) gene was placed upstream from the first exon of the naturally occurring murine btk gene (nucleotides 40,043 to 40,250 of the murine btk gene). The first exon of the btk gene does not contain a translational start site and initiation codon marking the 5′ region of the coding sequence; however, these features could be engineered into the exon if desired. The 3′ end of the coding region of the first exon is marked by a splice donor sequence. Given that splice donor recognition sequences can extend into intronic sequence, 103 bases of intron DNA was retained after the end of the btk first exon. The PGKbtkSD cassette lacks a 3′ polyadenylation signal. Accordingly, any transcript produced by the cassette cannot be properly processed, and therefore identified by 3′ RACE, unless the transcript is spliced to a 3′ exon that can be polyadenylated.

[0064] The above 3′ gene trap cassette was placed into a retroviral vector (in reverse orientation relative to the flanking LTR regions) that incorporated a polyadenylation site 5′ to the PGK promoter of the 3′ gene trap cassette, the neo gene was placed 5′ to the polyadenylation site, and a splice acceptor (SA) site was placed 5′ to the neo coding region to produce a functional SAneopA, or optionally a SAIRESneopA 5′ gene trap cassette. This vector also incorporates, in operable combination, a pair of recombinase recognition sites that flank the PGKbtkSD cassette. This vector typically requires that the target cell naturally express the trapped gene; however, this requirement can be overcome by adding a promoter that independently controls the expression of the selectable marker.

[0065] b. 3′ Gene Trapping

[0066] The btk vector was introduced into the embryonic stem cells using standard techniques. In brief, supernatant from GP+E packaging cells was added to approximately 2×10⁶ embryonic stem cells (at an input ratio of approximately 0.1 virus/target cell) for 16 hours and the cells were subsequently selected with G418 for 10 days. G418 resistant cells were subsequently isolated, grown up on 96-well plates and subjected to automated RNA isolation, reverse transcription, PCR and sequencing protocols to obtain the gene trapped sequences.

[0067] RNA Isolation was carried out on DNA bind plates (Corning/Costar) treated with 5′-amino (dT)₄₂ (GenoSys Biotechnologies) in a 50 mM Sodium Phosphate buffer, pH 8.6, and allowed to sit at room temperature overnight. Immediately prior to use the plates were rinsed three times with PBS and twice with TE. Cells were rinsed with PBS, lysed with a solution containing 100 mM Tris-HCl, 500 mM LiCl, 10 mM EDTA, 1% LiDS, and 5 mM DTT in DEPC water, and transferred to the DNA binding plate where the mRNA was captured. After a 15 minute incubation the RNA was washed twice with a solution containing 10 mM Tris-HCl, 150 mM LiCl, 1 mM EDTA, and 0.1% LiDS in DEPC water. The RNA was then rinsed three times with the same solution minus LiDS. Elution buffer containing 2 mM EDTA in DEPC water was added and the plate was heated at 70° C. for five minutes. An RT premix containing 2× First Strand buffer, 100 mM Tris-HCl, pH 8.3, 150 mM KCl, 6 mM MgCl₂, 2 mM dNTPs, RNAGuard (1.5 units/reaction, Pharmacia), 20 mM DTT, QT primer (3 pmol/rxn, GenoSys Biotechnologies, sequence: 5′ CCAGTGAGCAGAGTGACGAGGACTCGAGCTCAAGCTTTTTTTTTTTTTTTTT 3′, SEQ ID NO: 1) and Superscript II enzyme (200 units/r×n, Life Technologies) was added. The plate was transferred to a thermal cycler for the RT reaction (37° C. for 5 min. 42° C. for 30 min. and 55° C. for 10 min).

### Example 3

### Genetic Analysis of ES Cell Colonies

[0068] The cDNA was amplified using two rounds of PCR. The PCR premix contains: 1.1×MGBII buffer (74 mM Tris pH 8.8, 18.3 mM Ammonium Sulfate, 7.4 mM MgCl₂, 5.5 mM 2ME, 0.011% Gelatin), 11.1% DMSO (Sigma), 1.67 mM dNTPS, Taq (5 units/r×n), water and primers. The sequences of the first round primers are: Pₒ 5″AAGCCCGGTGCCTGACTAGCTAG3′, SEQ ID NO: 2; BTKₒ 5″GAATATGTCTCCAGGTCCAGAG3′, SEQ ID NO: 3; and Qₒ 5′ CCAGTGAGCAGAGTGACGAGGAC3′, SEQ ID NO: 4 (pmol/r×n). The sequences of the second round primers are Pᵢ 5″CTAGCTAGGGAGCTCGTC3′, SEQ ID NO: 5; BTKᵢ 5′ CCAGAGTCTTCAGAGATCAAGTC3′, SEQ ID NO: 6; and Qᵢ 5′ GAGGACTCGAGCTCAAGC3′, SEQ ID NO: 7 (50 pmol/rxn). The outer premix was added to an aliquot of cDNA and run for 17 cycles (95° C. for 1 min. 94° C. for 30 sec., 58° C. for 30 sec 65° C. for 3.5 min). An aliquot of this product was added to the inner premix and cycled at the same temperatures 40 times.

[0069] The nested 3′ RACE products were purified in a 96-well microtiter plate format using a two-step protocol as follows. Twenty-five microliters of each PCR product was applied to a 0.25 ml bed of Sephacryl.RTM. S-300 (Pharmacia Biotech AB, Uppsala, Sweden) that was previously equilibrated with STE buffer (150 mM NaCl, 10 mM Tris-HCL, 1 mM EDTA, pH 8.0). The products were recovered by centrifugation at 1200×g for 5 minutes. This step removes unincorporated nucleotides, oligonucleotides, and primer-dimers. Next, the products were applied to a 0.25 ml bed of Sephadex.RTM. G-50 (DNA Grade, Pharmacia Biotech AB) that was equilibrated in MilliQ H₂O, and recovered by centrifugation as described earlier. Purified PCR products were quantified by fluorescence using PicoGreen (Molecular Probes, Inc., Eugene Oreg.) as per the manufacturer's instructions.

[0070] Dye terminator cycle sequencing reaction with AmpliTaq.RTM. FS DNA polymerase (Perkin Elmer Applied Biosystems, Foster City, Calif.) were carried out using 7 pmoles of primer (Oligonucleotide OBS; 5″CTGTAAAACGACGGCCAGTC3′, SEQ ID NO: 8) and approximately 30-120 ng of 3′ RACE product. The cycling profile was 35 cycles of 95° C. for 10 sec, 55° C. for 30 sec, and 60° C. for 2 min. Unincorporated dye terminators were removed from the completed sequencing reactions using G-50 columns as described earlier. The reactions were dried under vacuum, resuspending in loading buffer, and electrophoresed through a 6% Long Ranger acrylamide gel (FMC BioProducts, Rockland, Me.) on an ABI Prism.RTM. 377 with XL upgrade as per the manufacturer's instructions.

[0071] The automated 96-well format was used to obtain sequence, and data was obtained from 70% of the colonies. Upon examination, the sequence from the first exon of btk was identified followed by the btk splice junction. The splice junction was followed by unique sequences from each separate gene trap event. These sequences averaged 500 bp in length and were of high quality often containing long open reading frames. In addition 80% of these sequences can be matched using blast searches to sequences found in the GenBank database indicating that transcribed exonic sequences were identified. These gene trap sequence tags are of significantly better length and quality than those produced by previous gene trap designs. The new tags are improved in both length and quality and the fact that 80% of the tags match GenBank sequences suggests that they efficiently trap genes.

### Example 4

### Using ES Cells to Generate Mice

[0072] ES cells of the current invention are used to generate a mouse of the current invention. Any technique known in the art can be employed to generate a mouse with an ES cell. For example, an ES cell can be used to generate a mouse by injecting the cell into a blastocyst as described, for example, in Bradley, 1987. In: Teratocarcinomas and Embryonic Stem Cells: A Practical Approach, Robertson, ed. IRL, Oxford, pp. 113-152. Blastocysts can be isolated from a pregnant mouse on day 3.5 of pregnancy. About 20-25 ES cells are typically injected into a blastocyst. Following injection, the blastocyst is implanted into a suitable pseudopregnant female foster animal and the embryo brought to term. Progeny of the foster animal are used to breed more animals. If an ES cell harboring the engineered genomic mutation entered the germline of the foster animal's Off-Spring, the mutation will be represented in the Off-Spring's gene pool. Animals are bred to obtain a Homozygote, Heterozygote, Chimera, Off-Spring and/or Wild-Type animal. One may determine if an ES cell carrying an engineered genomic mutation of interest has entered the germline by observing the coat color of Off-Spring mice. As the ES cells are derived from an agouti coat color strain and the blastocyst from a black coat color strain, second or higher generation Off-Spring carrying agouti coat color would be indicative that an ES cell carrying the engineered genomic mutation has entered the germline. In addition, Off-Spring animals are examined genetically to detect the presence of the genetrap vector and to characterize the engineered genomic mutation.

[0073] Additional background on generating a mouse can also be found in, for example, Puhler, A., Ed., Genetic Engineering of Animals, VCH Publ., 1993; Murphy and Carter, Eds., Transgenesis Techniques Principles and Protocols (Methods in Molecular Biology, Vol. 18), 1993; and Pinkert, Calif., Ed., Transgenic Animal Technology: A Laboratory Handbook, Academic Press, 1994. Transgenic mice may also be generated, for example, as described in Thomas et al. (1999) Immunol., 163:978-84; Kanakaraj et al. (1998) J. Exp. Med., 187:2073-9; or Yeh et al. (1997) Immunity 7:715-725;. Jaenisch (1988) Science, 240:1468-1474.

### Example 5

### Phenotypic analysis of mice

[0074] Functional annotation of the mammalian genome in the post-genome era is an important task. Genetic studies in model organisms provide an approach for understanding gene function. Technologies for parallel production and analysis of mouse mutants provides a valuable screen through mutations in druggable genes to identify targets for drug discovery. By carrying out genetic screens in a mammalian model system, one can screen directly for changes in physiology relevant to disease treatment. This example describes a biological screen for analyzing large numbers of mouse lines, for example, for screening 1000 mouse gene knockouts per year. This screen is focused on discovering the targets for therapeutic products in the areas of metabolism, endocrinology, immunology, neurology, cardiology, ophthalmology, reproductive biology and oncology.

### 5.1 INTRODUCTION

[0075] Genetic screens can be used to scan a genome for genes that play a role in any process of interest. Genetic screens were carried out in invertebrate model organisms and included saturation screens of Drosophila Model Organisms in Drug Discovery. Ed. Pamela M. Carroll and Kevin Fitzgerald Copyright 2003 John Wiley & Sons, Ltd., to identify genes involved in organization of the body plan during development (Nusslein-Volhard and Wieschaus, 1980) and screens in Caenorhabditis elegans to identify genes involved in producing the invariant cell lineage pattern (Horvitz and Sulston, 1980; Chalfie et al., 1981; Hedgecock et al., 1983). These screens relied on saturation mutagenesis to interrogate the genome for the set of genes involved in these processes and led to the discovery of genes such as the homeobox genes and apoptosis regulators involved in development across all invertebrate and vertebrate species examined. Since these screens, additional genetic screens have been carried out in the fly and worm, further demonstrating the power of genetics for the dissection of pathways and processes. These screens require only a method for creating large numbers of tractable mutations in genes and a phenotype that can be measured.

[0076] Genetic screening has been adapted for the vertebrate model organisms of zebrafish and mice. In zebrafish, both chemical mutagenesis (Mullins et al., 1994; Haffier et al., 1996) and gene trapping (Golling et al., 2002) have been combined with phenotypic screens to identify mutations affecting development of the neural crest, pigmentation, jaw, branchial arches, visual system, heart and other internal organs, ear, retina, brain, midline, shape and movement (Brockerhoff et al., 1995; Abdelilah et al., 1996; Baier et al., 1996; Brand et al., 1996; Chen et al., 1996; Granato et al., 1996; Kelsh et al., 1996; Malicki et al., 1996 a,b; Neuhauss et al., 1996; Odenthal et al., 1996; Piotrowski et al., 1996; Schier et al., 1996; Solnica-Krezel et al., 1996; Stemple et al., 1996). These screens take advantage of the large number of Off-Spring, oviparous development and transparent nature of the zebrafish embryo that make it a system for the study of vertebrate development that should result in the identification of genes involved in vertebrate development. For the purpose of drug discovery, effective genetic screens in mammals allow one to dissect mammalian physiology to identify key genes with therapeutic relevance as potential drug targets. Genetic screens in mammals are logistically possible with advances in mutagenesis and screening methods in mice that facilitate functional dissection of the mammalian genome. Advances in the scale and speed of gene targeting (Walke et al., 2001; Abuin et al., 2002) and the development of genome-wide gene trapping (Zambrowicz et al., 1998; Wiles et al., 2000; Leighton et al., 2001; Mitchell et al., 2001) in mouse embryonic stem cells resulted in mutations in a number of genes. The screen described in this example combines mouse screening methods with miniaturization of medical technologies and with disease challenge assays useful to the mouse model for diagnostic analysis of mice. The mouse is a model organism that is ideal for studying many aspects of mammalian physiology with direct medical relevance. Screens are used to identify genes involved in insulin sensitivity, hypertension, body fat deposition, energy expenditure, bone deposition and breakdown, angiogenesis and many other processes with significance for the treatment of disease.

[0077] These advances have brought together two aspects for genetic screens in mammals: the ability to produce large numbers of mutations and the ability to screen for phenotypes of interest. The development of mutagenesis strategies to mutate large numbers of mouse genes has been described (Zambrowicz et al., 1998; Wiles et al., 2000; Leighton et al., 2001; Mitchell et al., 2001). This example describes phenotypic screens designed to identify genes for use as targets to ameliorate diseases in the areas of diabetes/metabolism, cardiology, neurology, ophthalmology, reproductive biology, oncology and immunology/inflammation.

### 5.2 SATURATING THE DRUGGABLE GENOME

[0078] One of the advantages of doing genetic screens in the mouse model system is the ability to measure directly the physiological parameters relevant to disease. These direct measures allow the identification of gene products that, when modulated by small-molecule drugs, provide a therapeutic effect. This approach is supported by the excellent correlation between the knock-out phenotypes of the targets of marketed pharmaceutical drugs and the known efficacy and side-effects of those drugs (Zambrowicz and Sands, 2003). An example is a knock-out of the H+/K+ATPase: the target of drugs such as Prilosec™ (AstraZeneca) used to lower gastric acid secretion for the treatment of gastric ulcer disease. Knock-out of either the alpha or beta subunit of ATPase results in animals with neutral stomach pH—a phenotype that correlates with the action of the pharmacological antagonists of ATPase (Scarff et al., 1999; Spicer et al., 2000). Similarly, mammalian screens can be set up to identify the genes that play a role in any specified therapeutic area. For instance, if one is interested in genes that may be important for the treatment of diabetes, it is possible to screen mutations in mice for direct effects on blood glucose and insulin levels, insulin sensitivity and other parameters such as obesity that play an important role in the diabetic process. There are genes involved in the regulation of glucose homeostasis, for example, the insulin receptor, which when mutated in mice results in animals with severe insulin resistance and frank diabetes (Accili et al., 1996; Joshi et al., 1996). Likewise, if one is interested in genes important for the treatment of osteoporosis, one can screen for mutations that increase or decrease bone mineral density, as observed for mice with mutations of the cathepsin K (Saftig et al., 1998) and osteoprotegerin genes (Bucay et al., 1998; Mizuno et al., 1998), respectively. This genetic approach is useful to analyze the role of a gene within the mammalian organism and its medical relevance.

[0079] The ability to measure parameters of mammalian physiology by screening in a mammalian organism stands in contrast to attempts to identify genes with disease relevance in lower model organisms such as Drosophila. The Drosophila system is useful for defining genetic pathways because of the ability to perform saturation screens for genetic modifiers of phenotypes that have been established already; yet, these genetic screens often are designed artificially and are removed from mammalian physiology. For instance, primary phenotypes to be used for modifier screens often are developed based upon overexpression, ectopic expression or expression of dominant or activated forms of a gene known to be involved in disease in the Drosophila eye (Therrien et al., 2000; Hirose et al., 2001; LaJeunesse et al., 2001; Schreiber et al., 2002; Sullivan and Rubin, 2002). Screens then are used to identify modifier genes that ameliorate or exacerbate the eye phenotype originally produced. These screens are able to elucidate genetic pathways and the types of genes that might play a role in a pathway of interest, but the corresponding mammalian genes still must be identified and tested for any relevance to the original disease or physiology of interest.

[0080] Saturation screens for genetic modifiers in non-mammalian organisms can provide clues for finding genes that may play a role in a disease-relevant pathway, but carrying out genetic screens directly in mammals for those genes is a preferred approach as more relevant to disease or physiology of interest. The question is whether the ability to scan a genome using saturation mutagenesis in invertebrate organisms outweighs the ability to screen directly in a more focused manner for genes that modulate disease-relevant mammalian physiology. Two of the challenges of conducting genetic screens in the mouse mammalian model have centered on the issues of the speed at which tractable genetic mutations can be generated and the large number of genes that must be processed to provide broad genomic coverage. While saturation modifier screens in mice need logistical support, it is possible to create mutations in all members of the so-called druggable classes of genes through gene targeting and gene trapping. This creates an opportunity to saturate the druggable mammalian genome, which is an important milestone in the evolution of drug discovery in the post-genome era. These druggable genes include secreted proteins that could be biotherapeutics themselves, potential targets for antibody-based therapeutics and small-molecule drug targets that belong to gene families that have proved themselves to be amenable to small molecule modulation based upon marketed drugs (Hopkins and Groom, 2002). The druggable genes include GPCRs (G-protein coupled receptors), ion channels, nuclear hormone receptors, key enzymes, kinases, proteases, secreted proteins and cell surface proteins. Indeed, one could argue that all mammalian disease or disease treatment pathways of interest probably contain druggable genes, so that by mutating all the druggable genes in the genome one can interrogate all pathways for points of therapeutic intervention.

[0081] Gene knock-out technologies were implemented on a large scale for saturation of the druggable genome. A program was instituted to knock out and analyze the resulting phenotypes for 5000 genes from the mammalian genome. The 5000 genes chosen are all members of druggable gene families. It was suggested that the druggable genome may be as small as about 3000 genes (Hopkins and Groom, 2002); therefore, screening 5000 genes is believed to be sufficient to saturate the mammalian druggable genome in order to identify those genes that have the greatest potential for disease treatment.

### 5.3 EFFECTIVELY SCREENING THE GENOME FOR NOVEL DRUG TARGETS

[0082] When generating knock-out mouse lines at a rate of 1000 per year, one needs a biological evaluation process that has a high probability of identifying potential drug targets, as assessed by the physiological consequences of gene disruption. A process that maximizes the potential to identify therapeutically significant genes was developed.

[0083] This screening process applies filters for genomic information. First, the genome is examined for members of druggable families. Second, knock-out mice are generated for selected genes at an average rate of 20 lines of mutant mice per week. A minimum cohort for initial evaluation is 16 animals; 8 Homozygous nulls, 4 Heterozygotes and 4 Wild-Type animals for each gene. This cohort size has produced reliable data from the primary screen upon which decisions for secondary screens can be made. This process involves the integration of bioinformatics, mouse genetics, robotics and high-speed physiological evaluation in an infrastructure with the ability to operate at the required rate. Generating, maintaining, genotyping and characterizing the required number of animals is logistically feasible.

[0084] An initial biological evaluation of the animals is a comprehensive clinical assessment of physiological parameters that can be measured effectively in high-throughput mode. Each test has relevance to one or more therapeutic areas and is designed to yield information that can be correlated directly with therapeutic intervention. This process includes an extensive battery of behavioral evaluations (neurology), blood pressure and heart rate measurements (cardiology) and a complete hematology survey supplemented with fluorescence-activated cell sorting (FACS) scans for immune function (immunology). The animals also are evaluated for body fat content, lean body mass (metabolism), bone mineral density, bone mineral content (endocrinology) and retinal integrity/vascularization (ophthalmology). Effects on cell proliferation and reproductive organ development are studied (oncology) and fertility (reproductive biology) is assessed. This screening phase of biological investigation is referred to as Level 1 analysis.

[0085] This initial analysis of the physiological consequence of creating null mutations is designed to be unbiased with regard to potential outcome but to encompass phenotypes indicative of utility to our chosen therapeutic areas. All animals in all projects are submitted to the same tests in the same temporal sequence. This means that each test must be self-contained and have minimal impact on the outcome of subsequent tests. The aim of Level 1 analysis is to obtain a comprehensive understanding of gene function within the context of mammalian physiology. Variations from normal in any parameter are detected by comparison with cohort controls and with pooled historical data for all controls. Historical control data based on many animals give a good quantitative measure of normal values for each test and the level of background variation. Most of the tests are of primary importance to one particular therapeutic area (e.g. blood pressure and cardiology), but the total picture gained from this type of analysis is useful in identifying possible side-effects of target modulation. This allows the identification of targets with a potential for the development of target modulators.

[0086] In addition to therapeutic area-specific tests, multiple general diagnostic tests are performed. Level I pathology examines 52 tissues for the female and 53 tissues for the male. A complete gross necropsy is performed, with collection of tissues and photography of any significant gross lesions. Tissues are immersion-fixed in 10% neutral buffered formalin for 24 h, trimmed, processed to paraffin, embedded, sectioned at 4-5 mm, and stained with hematoxylin and eosin for histopathological examination. A board-certified pathologist examined tissues from one male and one female Homozygote for each project (Heterozygotes are examined for Homozygous lethal projects). Computer-assisted tomography (CAT) scanners operate effectively on mice and enable non-invasive evaluation of soft-tissue anatomy in addition to very refined skeletal analysis. Application of CAT (MicroCAT, ImTek Inc.) can be used to obtain morphological information non-invasively. All lesions are recorded and compared with controls in order to facilitate interpretation of phenotypes.

[0087] The output from all Level 1 tests is reduced to digital data and ported to a relational database. Data acquisition is rapid to the point that no Level 1 test is rate-limiting for the overall process. Numerical data is represented graphically with appropriate statistical tools, images are annotated by project scientists and interpretation of pharmaceutical relevance is summarized. It is therefore possible to gain a comprehensive view of the physiological function of every gene that is studied. This view encompasses those features that are most indicative of therapeutic potential in specific disease areas. Level 1 analysis has been a source of targets for drug discovery programs. Level 2 analysis entails the confirmation of Level 1 observations using additional animals and the application of specialized tests in a given project in reaction to Level 1 observations. Level 2 includes numerous therapeutic area-specific tests and challenge assays that cannot be used in the screening phase. Level 2 analysis may be triggered also through a hypothesis-driven approach. Level 3 analysis is designed for in-depth biological study in order to determine the merits of each target for assay development and high-throughput screening.

[0088] The decision to submit a given gene product to actual drug discovery is based on three criteria: modulation of the target by a small molecule, antibody or therapeutic protein could provide significant therapeutic effect with minimal or no discernable on-target side-effects; the target represents a potential breakthrough for the treatment of disease with significant advantages over existing therapies; and the program addresses a major unmet medical need. These criteria were applied to the analysis of multiple phenotypes and a number of projects were committed to further drug discovery following this analysis.

[0089] What follows is a brief description of the capabilities of the therapeutic area biology groups, including Level 1 and Level 2 tests that are most directly relevant to them.

### 5.4 HIGH-THROUGHPUT BIOLOGY MAXIMIZING RETURN FROM REVERSE GENETICS

[0090] 5.4.1 Endocrinology/Metabolism

[0091] Three of the most prevalent diseases of endocrinology/metabolism are Type II diabetes, obesity and osteoporosis. A comprehensive panel of physiological tests was implemented for each disease process that have proved to provide reliable clinical descriptions of disease-related symptoms. These tests include measures of body composition index, glucose homeostasis and bone mass.

[0092] 5.4.1.1 Level 1 Diabetes Tests

[0093] 5.4.1.1.1 Glucose Tolerance Test

[0094] The glucose tolerance test (GTT) is the standard for defining impaired glucose homeostasis in mammals. For example, intraperitoneal glucose tolerance tests showed improved glucose clearance and the serum glucose and insulin levels were significantly lower in protein tyrosine phosphatase-1B (PTP-1B) and SHIP2 knock-out mice (Klaman et al., 2000; Clement et al., 2001). These findings indicate improved insulin sensitivity, a possibility that confirmed by hyperinsulinemic-euglycemic clamp studies in the PTP-1B knock-out mice (Klaman et al., 2000). These results suggest that these two proteins are targets for new therapeutics aimed at Type II diabetes. In addition, the ability of retinoid X receptor agonists to lower serum glucose and insulin levels is used as evidence that these agonists act as insulin sensitizers in vivo (Mukherjee et al., 1997). These examples validate the effectiveness of GTT for the identification of potential targets for diabetes. Glucose tolerance tests are performed using a Lifescan glucometer. Animals are injected i.p. with 2 g/kg D-glucose, delivered as a 20% solution, and blood glucose levels are measured at 0, 30, 60 and 90 min after injection (Klaman et al., 2000).

[0095] 5.4.1.1.2 Urinalysis

[0096] Elevated glucose and/or ketone levels in urine are diagnostic markers for diabetes. Qualitative urinalysis is performed using Chemstrip 10 UA reagent strips (Roche) for the detection of glucose, bilirubin, ketones, blood, pH, protein, urobilinogen, nitrites and leukocytes in urine. Results are recorded using a Chemstrip 101 urine analyser.

[0097] 5.4.1.1.3 Serum Insulin

[0098] Serum insulin levels are also diagnostic markers for diabetes. Insulin levels are assayed using a sensitive rat radioimmunoassay kit from Linco, which is sensitive to 0.02 ng/ml insulin in serum.

[0099] 5.4.1.2 Level 2 Diabetes Tests

[0100] In Level 2, other tests are performed to verify and further define the role of targets in glucose homeostasis, for example, insulin tolerance test; insulin levels during GTT; insulin clearance (serum c-peptide/insulin ratio); measurement of serum free fatty acids, glycerol, glucagon, leptin, corticosterone; insulin content of pancreatic islets (radioimmunoassay); immunohistochemical analysis of pancreas for insulin, glucagon, somatostatin and pancreatic polypeptide; muscle and liver pathology, including glycogen and lipid content; pharmacological evaluation of liver slices, isolated soleus muscle and adipocytes.

[0101] 5.4.1.3 Level 1 Obesity Tests

[0102] Animal weight and percent body fat are measured in Level 1 to identify obesity phenotypes.

[0103] 5.4.1.3.1 Body Weight

[0104] All mice are weighed at 2, 4, 6, 8 and 16 weeks of age.

[0105] 5.4.1.3.2 Dual-Energy X-Ray Absorptiometry

[0106] Dual-energy X-ray absorptiometry (DEXA) is used to identify increased total body fat in melanocortin-3 receptor knock-out mice (Butler et al., 2000) and decreased total body fat in melanin concentrating hormone 1 receptor knock-out mice; the latter observation was confirmed by direct analysis of fat pad weights (Marsh et al., 2002). Such results suggest these proteins as targets for novel obesity therapies. In addition, DEXA was used to show that the small-molecule insulin mimetic cpd2 blocks the accumulation of body fat in mice fed a high fat diet, an observation confirmed by direct analysis of fat pad weights (Air et al., 2002). A DEXA instrument (Lunar Piximus) is used to record bone mineral density, bone mineral content, percent body fat and total tissue mass (Nagy and Clair, 2000; Punyanitya et al., 2000). Although primarily aimed at metabolic and osteoporotic conditions, DEXA is a sensitive measure of all-round wellbeing and often contributes to diagnosis in other therapeutic areas.

[0107] 5.4.1.4 Level 2 Obesity Tests

[0108] In Level 2, obesity targets are analyzed to determine whether they regulate metabolism, feeding, appetite or food absorption. Level 2 obesity tests include, for example, metabolic cages to measure food intake, water intake and fat malabsorption; Mini-Mitter telemetry for physical activity, core body temperature, drinking frequency and feeding frequency and duration; Oxymax measurement of metabolic rate and physical activity; home cage diet studies, including high-fat-diet challenge, food intake measurement and pair-feeding studies; fat mass by DEXA or nuclear magnetic resonance (Bruker Minispec); body composition analysis (analysis of carcass fat mass by Sohxlet; fat pad and organ weights); crosses to ob/ob mice; pharmacological challenge with leptin, melanocortin II and neuropeptide Y; blood pressure.

[0109] 5.4.1.5 Level 1 Osteoporosis Tests

[0110] 5.4.1.5.1 Bone Microcomputed Tomography

[0111] Osteoporosis is characterized by a decreased bone mineral density due to a deficiency in bone production or increased bone absorption resulting in brittle bones. Specialized microcomputed tomography (micro-CT) machines have been developed with the capacity to provide quantitative and imaging data on the three-dimensional structure of mouse bones. This technique is used to demonstrate the efficacy of parathyroid hormone in a mouse model of osteoporosis (Alexander et al., 2001) and is used to describe in three dimensions the changes in bone resulting from the osteopetrotic mutation, which leads to osteopetrosis (Abe et al., 2000). A Scanco Medical mCT40 machine is used for measurements of bone mineral density. This machine permits visualization of trabecular bone structure, which is critical in evaluating overall bone quality. This is a much more sensitive analysis of bone than can be achieved using DEXA alone and is a specialized test for osteoporosis that we have implemented as part of our Level 1 analysis.

[0112] 5.4.1.6 Level 2 Osteoporosis Tests

[0113] In Level 2, targets are analyzed to determine whether changes in bone mineral density are due to effects on bone deposition or bone resorption using various tests, for example, DEXA; micro-CT; undecalcified bone histomorphometry; bone histopathology; measurement of urinary helical peptide.

[0114] 5.4.2 Cardiology

[0115] The major disease areas of interest in cardiology are hypertension, thrombosis, atherosclerosis and heart failure.

[0116] 5.4.2.1 Level 1 Tests

[0117] 5.4.2.1.1 Blood Pressure

[0118] Blood pressure measurements facilitate finding targets that, upon inhibition, lead to a reduction in blood pressure. Angiotensin-converting enzyme inhibitors and angiotensin receptor antagonists are effective drugs in the treatment of hypertension. Both knock-outs have low blood pressure. Blood pressure is measured using a non-invasive computerized tail-cuff system, the Visitech Systems BP-2000. This technique is a validated approach (Krege et al., 1995; Ito et al., 1995; Oliver et al., 1998; Sugiyama et al., 2001). Ten measurements of blood pressure are made per day on each of 4 days for each animal evaluated. Results are recorded as the pooled average of 40 measurements.

[0119] 5.4.2.1.2 Zymosan Challenge Assay

[0120] Peritoneal leukocyte recruitment assays are used to identify targets that may regulate the inflammatory component of atherosclerosis. These assays detect abnormalities in immune cell recruitment to a site of inflammation. It has been shown in mutant such as C-C chemokine receptor 2 (CCR2) knock-outs that a defect in immune cell recruitment in these assays correlates well with a significant reduction in the inflammatory component of atherosclerosis and the subsequent plaque formation (Boring et al., 1997).

[0121] 5.4.2.1.3 Blood Lipids

[0122] High cholesterol and triglyceride levels are recognized risk factors in the development of cardiovascular disease. Measuring blood lipids facilitates finding the biological switches that regulate blood lipid levels; inhibition of these switches should lead to a reduction in the risk for cardiovascular disease.

[0123] 5.4.2.1.4 Optic Fundus Photography and Angiography

[0124] Optic fundus photography is performed on conscious animals using a modified Kowa Genesis small-animal-fundus camera (Hawes et al., 1999). Intraperitoneal injection of fluorescein permits the acquisition of direct light fundus images and fluorescent angiograms for each examination. In addition to direct opthalmological changes, this test can detect retinal changes associated with systemic diseases such as diabetes and atherosclerosis.

[0125] 5.4.2.2 Level 2 Cardiology Tests

[0126] Level 2 cardiology tests include, for example, platelet aggregation; vascular injury by carotid cuff, chemically induced thrombosis; Poloxamer-induced atherosclerosis; aortic banding; permanent coronary occlusion; crosses with apolipoprotein E, low-density lipoprotein receptor and knock-outs.

[0127] 5.4.3 Immunology

[0128] Our focus indications include acute inflammation, inflammatory bowel disease, transplantation, asthma, allergy, multiple sclerosis, rheumatoid arthritis and blood coagulation. The process of hematopoietic cell development and the regulation of mature immune cell function share several key signaling pathways, which are the result of similar molecular or cellular interactions. As an example, activation events via the antigen-specific T-cell receptor and co-stimulatory molecules are indispensable for both normal T cell development in the thymus and normal T-cell function during an immune response. Comprehensive phenotypic analysis of functionally relevant immune cell subpopulations in knock-out mice is essential for two reasons: it can reveal the role of a novel gene or expose the central role of a known gene in immune cell development and function; and at the same time it can provide the first hint about the potential mechanism that can lead to the observed immune deficiency.

[0129] 5.4.3.1 Level 1 Tests

[0130] 5.4.3.1.1 Complete Blood Cell Count

[0131] Evaluation of the cellular components of the immune system in knock-out mice and Wild-Type littermates is performed by automated determination of the absolute numbers of various cell types and ratios in the peripheral blood, i.e. complete blood cell count (CBC). This analysis is followed by a more detailed study using flow cytometry, which is designed to determine the relative proportions of CD4+ and CD8+T cells, B cells, NK cells and monocytes in the mononuclear cell population. In the absence of a single molecular entity, disturbances in the proportion of any of the analyzed cell types could signal a key role for that molecule in governing the immune system, as exemplified in the following knock-out phenotypes.

[0132] The immunosuppressants cyclosporin A and FK506, which are useful to prevent transplant rejection, inhibit the immune response by inhibiting the catalytic activity of one or both isoforms of calcineurin A (can) in lymphocytes. Mice deficient in the b-isoform of the enzyme have a significant reduction in peripheral T lymphocytes due to 75% and 65% reductions in CD4+ and CD8+ positive thymocytes, respectively (Bueno et al., 2002). Mice deficient in expression of granulocyte colony-stimulating factor (G-CSF) exhibit chronic neutropenia with a 70-80% reduction in circulating neutrophils, whereas recombinant GCSF (Neupogen) stimulates neutrophil production and is used to treat neutropenia (Lieschke et al., 1994).

[0133] This test requires 135 μl of whole blood and employs a Cell-Dyn 3500R hematology analyzer. It reports on white blood cell count, neutrophils, lymphocytes, monocytes, eosinophils, basophils, red blood cell count and other standard hematology markers.

[0134] 5.4.3.1.2 Blood Chemistry

[0135] A Cobas Integra 400 serum analyzer is used to measure a range of soluble serum components using approximately 85 ml of serum. Serum levels are recorded for alkaline phosphatase, albumin, total cholesterol, triglycerides, blood urea nitrogen, glucose, alanine aminotransferase, bilirubin, phosphate, creatinine, calcium and uric acid.

[0136] 5.4.3.1.3 Fluorescence-Activated Cell Sorting (FACS)

[0137] Flow cytometry is designed to determine the relative proportions of CD4+ and CD8+T cells, B cells, NK cells and monocytes in the mononuclear cell population. A Becton-Dickinson FACSCalibur 3-laser FACS machine is used to assess immune status. For Level 1 screening, this machine records CD4+/CD8−, CD8+/CD4−, NK, B cell and monocyte numbers, in addition to the CD4+/CD8+ ratio.

[0138] 5.4.3.1.4 Ovalbumin Challenge

[0139] Chicken ovalbumin (OVA) is a T-cell-dependent antigen used as a model protein for studying antigen-specific immune responses in mice. It is non-toxic and inert and therefore will not cause harm to the animals even if no immune response is induced. The murine immune response to OVA has been well characterized, to the extent that the immunodominant peptides for eliciting T-cell responses have been identified. Anti-OVA antibodies are detectable 8-10 days after immunization using enzyme-linked immunosorbent assay, and determination of different isotypes of antibodies gives further information on the complex processes that may lead to a deficient response in genetically engineered mice.

[0140] The cyclosporin-mediated suppression of immune response once again demonstrates the similarity of phenotype using the suppressive agent or the genetic knock-out mice in this challenge model. Both cyclosporin-treated animals and mice knocked out for calcineurin A, in this case the a-isoform, show deficiency in T-cell-dependent antigen response (Puignero et al., 1995; Zhang et al., 1996).

[0141] Another example is the cytokine tumor necrosis factor a (TNF-a), whose important role in modulating inflammatory and antibody responses is well known. Two treatment options are available for patients with rheumatoid arthritis, a soluble receptor (Enbrel) and antibody (Remicade), both based on blocking the TNF-a activity. Underlining the effectiveness of drug therapy, mice deficient in TNF-a exhibit impaired humoral response to both T-cell dependent and T-cell-independent antigens (Pasparakis et al., 1996).

[0142] It is important to note that, even without antigenic challenge, the make-up of the immunoglobulin repertoire in a knock-out mouse is highly informative, because isotype switching of immunoglobulins is dependent on the interaction between B and T lymphocytes. Examples of the type of receptors required for normal function of T and B cells are the so-called co-stimulatory molecules, including CD28 and CD40 receptors, both of which are targets of antibody-based therapy with ongoing clinical trials for the treatment of various autoimmune diseases. In this case, mice deficient in either of these receptors register an impairment in immunoglobulin class switching, which is detectable in the serum of the animals (Shahinian et al., 1993, Kawabe et al., 1994). The protocol assesses the ability of mice to raise an antigen-specific immune response. Animals are injected i.p. with 50 mg of OVA emulsified in Complete Feund's Adjuvant; 8 days later the serum titer of anti-OVA antibodies (IgG1 and IgG2 subclasses) is measured.

[0143] 5.4.3.2 Level 2 Immunology Tests

[0144] The following Level 2 tests are used to test for disease indication for a given target, for example, T-Cell activation, CD3 monoclonal antibody (mAb)+CD28 mAb induced; B-Cell activation, CD40 mAb+IL4 induced; mixed lymphocyte reaction provoked by irradiated BALB/C spleen cells; lipopolysaccharide challenge to evaluate acute phase response; Oxazolone sensitization and challenge for contact hypersensitivity; ovalbumin vaccine model; bovine collagen-induced arthritis; dextran sulfate gavage: inflammatory bowel disease model; ovalbumin+alum immunization followed by aerosol delivery of ovalbumin as asthma model; allograft rejection; blood coagulation assays: prothrombin time and activated partial thromboplastin; platelet aggregation; bone marrow transplantation.

[0145] 5.4.4 Neurology

[0146] Neurology focuses on the identification of targets for anxiety, depression, schizophrenia, pain, sleep disorders, learning and memory disorders, neuromuscular disease and neurodegenerative disorders. The Level 1 assays have been based upon the behavioral phenotypes associated with knock-outs of known central nervous system targets as well as the actions of known drugs.

[0147] 5.4.4.1 Level 1 Tests

[0148] 5.4.4.1.1 Open Field Test

[0149] Several targets of known drugs have exhibited phenotypes in the open field test. These include knock-outs of the serotonin transporter, the dopamine transporter (Giros et al., 1996), and the GABA receptor (Homanics et al., 1997). An automated open-field assay is used to address changes related to affective state and exploratory patterns related to learning. First, the field (40×40 cm) is relatively large for a mouse, which is designed to pick up changes in locomotor activity associated with exploration. In addition, there are four holes in the floor to allow for nose-poking, an activity specifically related to exploration. Several factors have been designed to heighten the affective state associated with this test. The open-field test is the first experimental procedure in which the mice are tested, and the measurements taken are the subjects' first experience with the chamber. In addition, the open field is brightly lit. All these factors will heighten the natural anxiety associated with novel and open spaces. Thus, pattern and extent of exploratory activity, especially the center-to-total distance traveled ratio, may be able to discern changes related to susceptibility to anxiety or depression. A large arena (40 cm×40 cm, VersaMax animal activity monitoring system from AccuScan Instruments) with infrared beams at three different levels is used to record rearing, hole poke and locomotor activity. The animal is placed in the center and its activity is measured for 20 min. Data from this test are analyzed in five 4-min intervals. The total distance traveled (cm), vertical movement number (rearing), number of hole pokes and the center-to-total distance ratio are recorded.

[0150] 5.4.4.1.2 Inverted Screen

[0151] This test is used to measure motor strength/coordination. Untrained mice are placed individually on top of a square (7.5 cm×7.5 cm) wire screen that is mounted horizontally on a metal rod. The rod is rotated 180° so that the mice are on the bottom of the screens. The following behavioral responses are recorded over a 1-min testing session: fell off, did not climb and climbed up.

[0152] 5.4.4.1.3 Functional Observation Battery

[0153] This is a modified SHIRPA (Rogers et al., 2001) analysis in which the animals are scored systematically for 37 individual behavioral and physical characteristics, such as vision, response to touch, palpebral closure, etc. It is a formalization of the complete observation of the whole organism, which often gives the first hint as to phenotype.

[0154] 5.4.4.1.4 Hot Plate and Formalin Paw

[0155] The 55° C. hot plate is a standard assay for measuring nociception in animals. Knock-out of either the m-opioid receptor (Sora et al., 1997) or COX 1 (Ballou et al., 2000) (both targets of analgesic drugs) results in effects on response latency in the hot-plate assay. Analgesia, such as that produced by morphine and other strong analgesics, is also detected using this assay. The hot-plate test is carried out by placing each mouse on a small, enclosed 55° C. hot plate (Hot Plate Analgesia Meter, Columbus instruments). Latency to a hind-limb response (lick, shake or jump) is recorded, with a maximum time on the hot plate of 30 s. Each animal is tested once.

[0156] The formalin paw assay is useful for hyperalgesia, as well as initial acute nociception. Recently, this assay has been automated and thus has become available for use in high-throughput analysis. Drugs that address novel mechanisms of hyperalgesia, without the side-effects of potent non-steroidal anti-inflammatory drugs, will be very useful new therapeutics.

[0157] 5.4.4.1.5 Prepulse Inhibition

[0158] Prepulse inhibition is a pre-attentive process that has been shown to be deficient in patients with schizophrenia. This reduced ability to filter out environmental stimuli may contribute to both positive and negative symptoms of the disease. Antipsychotics can ameliorate some deficits in prepulse inhibition, therefore genetic inhibition of a target that can increase prepulse inhibition may presage a small-molecule therapeutic that can help patients with their disorder. The prepulse inhibition of the startle response assay is an automated measure of the startle response both with and without various intensities of prepulses. Targets whose genetic inhibition produces changes in prepulse inhibition without changes in the startle response itself may be excellent for the discovery of new therapeutics.

[0159] This test employs a San Diego Instruments SR-lab startle response system. Prepulse inhibition of the acoustic startle reflex occurs when a loud 120 decibel (dB) startle-inducing tone is preceded by a softer (prepulse) tone. The prepulse inhibition paradigm consists of six different trial types (70 dB background noise, 120 dB alone, 74+120 dB at postpartum day 4, 78+120 dB at postpartum day 8, 82+120 dB at postpartum day 12, and 90+120 dB at postpartum day 20) each repeated in pseudorandom order six times for a total of 36 trials. The maximum response to the stimulus (Vmax) is averaged for each trial type. The percentage inhibition of the animal's response to the startle stimulus is calculated for each prepulse intensity and then graphed. This test is being used increasingly as a model of human schizophrenia and a test for antipsychotic drugs.

[0160] 5.4.4.1.6 Tail Suspension

[0161] The tail-suspension and forced-swim assays are two assays for the discovery and validation of novel antidepressants. The knock-out of the noradrenalin transporter, one target of the antidepressant Welbutrin™, demonstrates an increased struggle time in the tail-suspension assay (Xu et al., 2000). The tail-suspension assay used is automated, giving it added objectivity and making it appropriate for high-throughput analysis. Both of these assays measure the efforts of the subject to extricate itself from an inescapable situation, i.e. they measure a tendency toward ‘giving up’. Compounds known to reduce depressive symptoms in patients reduce the immobility time in tail suspension, therefore gene knock-outs that result in decreased time spent being immobile, in the absence of any general increase in activity levels (as measured in assays such as the open field), indicate targets for the discovery of novel therapeutics for the treatment of depression. In this particular set-up (PHM-300 Tail Suspension Test Cubicle) a mouse is suspended by its tail for 6 min, and in response the mouse will struggle to escape from this position. Extended struggle is taken as antidepressive behavior, whereas curtailed struggle is interpreted as depressive.

[0162] 5.4.4.1.7 Circadian Rhythms

[0163] Changes in sleep patterns can be detected by examining activity continuously over a period of days and nights. An infrared beam system is used that monitors the horizontal locomotor activity of individual mice in their home cage environment for 3 days and nights. This facilitates obtaining an accurate indication of their sleep-wake cycle as well as overall locomotor activity rates. Changes in the normal circadian rhythm or an increase or decrease in the periods of activity during the normal sleep cycle indicates genes controlling sleep and indicates therapeutic utility for other conditions, such as depression or schizophrenia, in which normal sleep patterns are disrupted.

[0164] 5.4.4.1.8 Trace Aversive Conditioning

[0165] Cognition, especially the loss of cognitive abilities in dementias such as Alzheimer's disease, later-stage Parkinson's and Huntington's disease, as well as in schizophrenia, is a major focus for drug discovery. This area has been hampered particularly by the lack of rapid assays that specifically target the learning and memory losses associated with these diseases, i.e. learning and memory dependent on areas of the brain such as the hippocampus. Assays generally used, such as the eight-arm radial arm maze or delayed-nonmatching-to-sample procedures require significant time and training. However, animals learn aversive conditioning very easily and this can be combined with ‘trace’ conditioning, in which there is a time interval between the signal stimulus and the aversive stimulus itself, to provide a rapidly (3-5 trials) learned response that is dependent upon the function of the hippocampus. As with most of our other assays, this assay has been automated to increase objectivity and make it appropriate for high throughput behavioral analysis. Gene knock-outs that affect learning and memory in this assay, without changes in basic sensory or motor function, will indicate targets for new treatments for cognitive disorders.

[0166] 5.4.4.2 Level 2 Neurology Tests

[0167] Level 2 neurology tests include, for example, neurochemical analysis of dopamine, norepinephrine, serotonin and their primary metabolites in urine, blood, cerebrospinal fluid (CSF) and brain tissue; levels of melatonin and homocysteine in urine, blood, CSF and brain tissue; in situ hybridization/immunocytochemical analyses using Neo, LacZ or radioactivity; immunohistochemical analyses of markers of choice; pharmacological challenges in vivo; electroretinogram (vision); auditory brainstem response (hearing); detailed neuroanatomical/pathological analysis of brain, spinal cord, eye, ear and peripheral ganglia; field potential and whole-cell patch clamp in brain slices; whole-cell patch clamp of cultured neurons and other cells (HEK, etc.); fluorescence imaging of brain slices and cells; olfactory discrimination test (olfaction and social recognition); trace and delay aversive conditioning; social interaction and social recognition tests; zero maze (anxiety).

[0168] 5.4.5 Oncology

[0169] The targets of oncology therapeutics fall into three major categories: cytotoxic agents such as DNA damaging agents or inhibitors of tubulin or topoisomerase, tissue-specific growth regulators such as estrogen receptor blockers and leutinizing hormone blockers, and disease-specific antitumor agents such as Gleevec™, Herceptin™ and Rituxan™. The oncology Level 1 screen is directed at targets for cancer drugs that fall into the same categories operating through control points in mammalian cell cycle, apoptosis or response to DNA damage.

[0170] 5.4.5.1 Level 1 Tests

[0171] 5.4.5.1.1 Embyronic Lethality and Reduced Viability

[0172] Targets for cytotoxic agents are identified first by embryonic lethality or reduced viability. These phenotypes are examined further to determine effects on cell cycle, apoptosis and angiogensis.

[0173] 5.4.5.1.2 Tissue-Specific Growth Regulation

[0174] Targets affecting growth, differentiation and function of reproductive organs are examined through histopathologic survey of males, virgin females and lactating female mice.

[0175] 5.4.5.1.3 Cell Proliferation

[0176] Oncogene targets that have a direct effect on cell cycle, DNA repair or apoptosis can manifest their function through changes in adult skin fibroblast proliferation. Punch biopsies are taken of skin samples from the backs of mutant mice and cohort controls. These are developed into primary fibroblast cultures and the fibroblast proliferation rates are measured in a controlled protocol. The ability of this assay to detect hyperproliferative and hypoproliferative phenotypes has been demonstrated with p53 and Ku80.

[0177] 5.4.5.2 Level 2 Oncology Tests

[0178] Targets identified from Level 1 are characterized further for their role in mammalian tumorigenesis. Focus is placed on targets that are highly expressed in human tumor cell lines and capable of driving the tumor phenotype as demonstrated by gene knock-down studies or overexpression-driven tumorigenesis models in nude mice.

[0179] 5.4.5.2.1 Quantitative Polymerase Chain Reaction for Analysis of Expression in Cancerous and Normal Cell Lines and Tissues

[0180] Quantitative polymerase chain reaction of candidate genes is done using cDNA prepared from 66 cancer and nine normal cell lines from ATCC, seven primary cell strains from Clonetics, about three cancer lines and matched adjacent normal tissue controls from Ambion, MCF-7 breast cancer cells+/−17b-estradiol and LNCaP prostate cancer cells+/−dihydrotestosterone. This is done to identify targets that are overexpressed in cancerous cell lines relative to normal cell and tissue controls.

[0181] 5.4.5.2.2 Gene Knock-Down Studies with Short Interfering RNA

[0182] Cancer cell lines determined to be overexpressing a target of interest are cotransfected with 3-6 short hairpin RNA vectors and blasticidin resistance vectors or synthetic short interfering RNAs to knock down the expression of specific targets. Assessment is made of the effects of RNA interference on in vitro proliferation, anchorage-dependent and anchorage-independent colony formation and the ability of cell lines to form tumors in nude mice.

[0183] 5.4.5.2.3 Overexpression Studies for Putative Oncogenes

[0184] Oncology targets are tested to determine whether they can drive tumor formation. Full-length genes of interest are cloned into a mammalian expression vector and co-transfected into NIH3T3 and RK3E cells with a blasticidin-resistance vector. The resulting blasticidin-resistant polyclonal pools are tested in vitro for acquisition of anchorage independence, reduced serum dependence and increased focus-forming ability. Stably transfected cell lines expressing exogenous cDNAs of interest are then analyzed for their ability to form tumors in athymic nude mice.

### 5.5 CONCLUSIONS

[0185] Described here is a new conceptual framework for the discovery of drugs using the mammalian genome as a starting point in the analysis. The framework requires genetic antagonism of the drug target combined with a comprehensive in vivo physiological characterization of target function before any chemical screens for pharmaceutical agents are launched. This process constitutes a powerful genetic screen for the targets that allow for maximizing therapeutic effects while minimizing side-effects resulting from therapies modulating the target. In addition, determination of the role of the target in mammalian physiology enables identification of the medical indications for the therapeutics to be developed. Although this may appear an obvious prerequisite, it is important to note that many screens are conducted today against molecular targets for which the medical utility is either completely unknown or hypothesized based on only biochemical, gene expression or lower model organism data.

[0186] The mammalian genetic screen described here is engineered specifically to reveal those genes that encode control points in physiology useful in the treatment of major diseases. The tests described here measure important medical parameters of physiology that are associated with points of therapeutic intervention and medical needs. Additionally, the tests are robust in their application to thousands of animals.

[0187] The screen used to identify therapeutic targets can be applied again to demonstrate the efficacy and potential side-effects of candidate therapeutic agents. This broad phenotypic screen, guided by mammalian genetics, provides a new performance level for the preclinical testing of compounds that are developed to interact with chosen targets. The screen enables identification of the key biomarker indicators of efficacy that should be followed when a compound is at the first-time-in-mammal stage. The genetic tools available for preclinical studies include not only Wild-Type animals but also knock-outs and knock-ins containing the actual human gene targets. The knock-out animals provide guidance for determining the efficacy of novel therapeutic agents. Another powerful aspect of the preclinical testing capabilities includes the treatment of knock-out animals themselves with compounds specific for the target. In such a scenario any effects seen, outside those associated with the knock-out state, are, by definition, off-target side-effects attributable to the compound itself. The ability to manipulate the mouse genome at will provides a powerful tool to define accurately the on-target versus off-target side-effects produced by a given agent. Such new approaches are also very useful in combination with medicinal chemistry strategies to optimize therapeutic agents.

[0188] In the post-genome era, a systematic in vivo screen for targets is a precondition for high-throughput screening of small molecule therapeutics to identify the targets for treatments for disease.

### 5.6 REFERENCES

[0189] Abdelilah, S., et aL (1996) Development 123, 217-227.
[0190] Abe, S., et al. (2000) Br. J. Radiol. 73, 1078-1082.
[0191] Abuin, A., et al. (2002) Trends Biotechnol. 20, 36-42.
[0192] Accili, D., et al. (1996) Nat. Genet. 12, 106-109.
[0193] Air, E. L., et al. (2002) Nat. Med. 8, 179-183.
[0194] Alexander, J. M., et al. (2001) J Bone Miner. Res. 16, 1665-1673.
[0195] Baier, H., et al. (1996) Development 123, 415-425.
[0196] Ballou, L. R., et aL (2000) Proc. Natl. Acad. Sci. USA 97, 10272-10276.
[0197] Boring, L., et al. (1997) J. Clin. Invest. 100, 2552-2561.
[0198] Brand, M., et al. (1996) Development 123, 129-142.
[0199] Brockerhoff, S. E., et al. (1995) Proc. Natl. Acad. Sci. USA 92, 10545-10549.
[0200] Bucay, N., et al. (1998) Genes Dev. 12, 1260-1268.
[0201] Bueno, O. F., et aL (2002) Proc. Natl. Acad. Sci. USA 99, 9398-9403.
[0202] Butler, A. A., et aL (2000) Endocrinology 141, 3518-3521.
[0203] Chalfie, M., et al. (1981) Cell 24, 59-69.
[0204] Chen, J. N., et al. (1996) Development 123, 293-302.
[0205] Clement, S., et al. (2001) Nature 409, 92-97.
[0206] Giros, B., et al. (1996) Nature 379, 606-612.
[0207] Golling, G., et al. (2002) Nat. Genet. 31, 135-140.
[0208] Granato, M., et al. (1996) Development 123, 399-413.
[0209] Haffier, P., et al. (1996) Development 123, 1-36.
[0210] Hawes, N. L., et al. (1999) Mol. Vis. 5, 22.
[0211] Hedgecock, E. M., et al. (1983) Science 220, 1277-1279.
[0212] Hirose, F., et al. (2001) Mol. Cell Biol. 21, 7231-7242.
[0213] Homanics, G. E., et al. (1997) Proc. Natl. Acad. Sci. USA 94, 4143-4148.
[0214] Hopkins, A. L. and Groom, C. R. (2002) Nat. Rev. Drug Discov. 1, 727-730.
[0215] Horvitz, H. R. and Sulston, J. E. (1980) Genetics 96, 435-454.
[0216] Ito, M., et al. (1995) Proc. Natl. Acad. Sci. USA 92, 3521-3525.
[0217] Joshi, R. L., et al. (1996) EMBO J. 15, 1542-1547.
[0218] Kawabe, T., et al. (1994) Immunity 1, 167-178.
[0219] Kelsh, R. N., et al. (1996) Development 123, 369-389.
[0220] Klaman, L. D., et al. (2000) Mol. Cell Biol. 20, 5479-5489.
[0221] Krege, J. H., et al. (1995) Hypertension 25, 1111-1115.
[0222] LaJeunesse, D. R., et al. (2001) Genetics 158, 667-679.
[0223] Leighton, P. A., et al. (2001) Nature 410, 174-179.
[0224] Lieschke, G. J., et al (1994) Blood 84, 1737-1746.
[0225] Malicki, J., et al. (1996a) Development 123, 263-273.
[0226] Malicki, J., et al. (1996b) Development 123, 275-283.
[0227] Marsh, D. J., et al. (2002) Proc. Natl. Acad. Sci. USA 99, 3240-3245.
[0228] Mitchell, K. J., et al. (2001) Nat. Genet. 28, 241-249.
[0229] Mizuno, A., et al. (1998) Biochem. Biophys. Res. Commun. 247, 610-615.
[0230] Mukherjee, R., et al (1997) Nature 386, 407-410.
[0231] Mullins, M. C., et al. (1994) Curr. Biol. 4, 189-202.
[0232] Nagy, T. R. and Clair, A. L. (2000) Obes. Res. 8, 392-398.
[0233] Neuhauss, S. C., et al. (1996) Development 123, 357-367.
[0234] Nusslein-Volhard, C. and Wieschaus, E. (1980) Nature 287, 795-801.
[0235] Odenthal, J., et al. (1996) Development 123, 103-115.
[0236] Oliver, P. M., et al. (1998) Proc. Natl. Acad. Sci. USA 95, 2547-2551.
[0237] Pasparakis, M., et al. (1996) J. Exp. Med. 184, 1397-1411.
[0238] Piotrowski, T., et al. (1996) Development 123, 345-356.
[0239] Puignero, V., et al. (1995) Int. Arch. Allergy Immunol. 108, 142-147.
[0240] Punyanitya, M., et al. (2000) FASEB J. 14, 497.
[0241] Rogers, D., et al. (2001) Neurosci. Lett. 306, 89-92.
[0242] Saftig, P., et al. (1998) Proc. Natl. Acad. Sci. USA 95, 13453-13458.
[0243] Scarff, K. L., et al. (1999) Gastroenterology 117, 605-618.
[0244] Schier, A. F., et al. (1996) Development 123, 165-178.
[0245] Schreiber, S. L., et al. (2002) Genesis 33, 141-152.
[0246] Shahinian, A., et al. (1993) Science 261, 609-612.
[0247] Solnica-Krezel, L., et al. (1996) Development 123, 67-80.
[0248] Sora, I., et al. (1997) Proc. Natl. Acad. Sci. USA 94, 1544-1549.
[0249] Spicer, Z., et al. (2000) J. Biol. Chem. 275, 21555-21565.
[0250] Stemple, D. L., et al. (1996) Development 123, 117-128.
[0251] Sugiyama, F., et al. (2001) Genomics 71, 70-77.
[0252] Sullivan, K. M. and Rubin, G. M. (2002) Genetics 161, 183-193.
[0253] Therrien, M., et al. (2000) Genetics 156, 1231-1242.
[0254] Walke, D. W., et al. (2001) Curr. Opin. Biotechnol. 12, 626-631.
[0255] Wiles, M. V., et al. (2000) Nat. Genet. 24, 13-14.
[0256] Xu, F., et al. (2000) Nat. Neurosci. 3, 465-471.
[0257] Zambrowicz, B. P. and Sands, A. T. (2003) Nat. Rev. Drug Discov. 2, 38-51.
[0258] Zambrowicz, B. P., et al. (1998) Nature 392, 608-611.
[0259] Zhang, B. W., et al. (1996) J. Exp. Med. 183, 413-420. 278.

### Example 6

### A Mouse Library with 10 Distinct Mouse Mutants

[0260] A mouse library of 10 distinct mouse mutants or mouse lines was generated. The following table (Table 1) describes the vector used to generate each line. Each vector is a gene trap vector that may integrate into a gene in the mouse genome and result in a gene transcript comprising vector sequences and exon sequences from the gene. The polynucleotide sequences referenced in Table 1, and disclosed in the appended Sequence Listing, were obtained by sequencing transcripts that include sequences of the gene trap vector. Table 1 also provides phenotypic data of each mouse line.

TABLE 1

| Line | | SEQ | |
|---|---|---|---|
| No. | Vector: | ID: | Phenotype: |
| 1. | VICTR 37 | 9 | Mutation of the gene encoding the ortholog of human Smhs2 |
| | | | homolog (rat) (FLJ34588) resulted in an increased exploratory |
| | | | response and a decreased anxiety-related response in female (−/−) |
| | | | mice. Gene disruption was confirmed by Southern blot. |
| 2. | VICTR 48 | 10 | Mutation of the gene encoding the ortholog of a putative human |
| | | | acyl-CoA dehydrogenase (FLJ12592) resulted in decreased bone |
| | | | measurements in (−/−) mice. Transcript was absent by RT-PCR. |
| 3. | VICTR 48 | 11 | Mutation of the gene encoding the ortholog of human leucine |
| | | | aminopeptidase 3 (LAP3) resulted in enhanced learning/memory |
| | | | in (−/−) mice. Transcript was absent by RT-PCR. |
| 4. | VICTR 37 | 12 | Mutation of the gene encoding the ortholog of human heparan |
| | | | sulfate 6-O-sulfotransferase 1 (HS6ST1) resulted in smaller (−/−) |
| | | | mice. Female (−/−) mice exhibited decreased bone mineral content |
| | | | and density. |
| 5. | VICTR 37 | 13 | Mutation of the gene encoding the ortholog of human |
| | | | prostaglandin F2 receptor negative regulator (PTGFRN) resulted |
| | | | in a decreased depressive-like response in (−/−) mice. Transcript |
| | | | was absent by RT-PCR |
| 6. | VICTR 48 | 14 | Mutation of the gene encoding the ortholog of human lambda |
| | | | crystallin homolog; crystalline, lambda 1 (CRYL1) resulted in |
| | | | immunological abnormalities and increased cholesterol in (−/−) |
| | | | mice. Male (−/−) mice exhibited increased serum insulin levels and |
| | | | enhanced glucose tolerance. Transcript was absent by RT-PCR. |
| 7. | VICTR 37 | 15 | Mutation of the gene encoding the ortholog of human |
| | | | transmembrane 7 superfamily member 3 (TM7SF3) resulted in |
| | | | impaired motor coordination in (−/−) mice. Male (−/−) mice also |
| | | | exhibited a decreased heart rate. Transcript was absent by RT-PCR. |
| 8. | VICTR 48 | 16 | Mutation of the gene encoding the ortholog of human family with |
| | MTII | | sequence similarity 19 (chemokine (C-C motif)-like), member A4 |
| | | | (FAM19A4) resulted in an increased anxiety-like response in male |
| | | | (−/−) mice. Transcript was absent by RT-PCR. |
| 9. | VICTR 48 | 17 | Mutation of the gene encoding the ortholog of human 15 kDa |
| | MTII | | selenoprotein (SEP15) resulted in an abnormal exploratory |
| | | | response in (−/−) mice. Transcript was absent by RT-PCR. |
| 10. | VICTR 48 | 18 | Mutation of the gene encoding the ortholog of human “similar to |
| | MTII | | embigin” (LOC133418) resulted in slightly smaller (−/−) mice, |
| | | | more notably in females. Male (−/−) mice exhibited a decreased |
| | | | anxiety-related response. Transcript was absent by RT-PCR |

[0261] The polynucleotide sequences referenced in Table 1 were used to search the Genbank database to identify mouse polynucleotide sequences by accession numbers (Mouse Nucleotide Accession Nos.) that represent the full length transcript corresponding to the gene carrying the engineered mutation in each mouse line of Table 1. Also obtained were the corresponding polypeptide sequences by accession numbers (Mouse Protein Accession Nos.). Also obtained were the human polynucleotide (Human Nucleotide Accession Nos.) and polypeptide sequences (Human Protein Accession Nos.) that correspond to the mouse sequences. The Genbank accession numbers for all four types of sequences are shown below in Table 2 for each of the 10 mouse lines.

TABLE 2

| | Mouse | | | |
|---|---|---|---|---|
| | Nucleotide | Mouse Protein | Human | Human Protein |
| Line | Accession | Accession | Nucleotide | Accession |
| No. | Nos.: | Nos.: | Accession Nos.: | Nos.: |
| 1. | NM_028643 | NP_082919 | NM_152726 | N/A |
| 2. | BC045199 | Q8OXL6 | NM_032169 | Q8WUT6 |
| 3. | AF334160 | Q9CWN8 | NM_015907 | Q9CPY7 |
| 4. | NM_015818 | NP_056633 | NM_004807 | NP_004798 |
| 5. | NM_011197 | Q9WV91 | NM_020440 | Q9P2B2 |
| 6. | NM_030004 | Q99KP3 | NM_015974 | Q9P0G7 |
| 7. | BC049960 | Q9CRG1 | NM_016551 | Q9NS93 |
| 8. | NM_177233 | Q7TPG5 | NM_182522 | Q96LR4 |
| 9. | NM_053102 | NP_444332 | NM_004261 | NP_004252 |
| 10. | NM_010330 | NP_034460 | XM_059649 | XP_059649 |

### Example 7

### Polynucleotides Sequences Obtained from Hybrid Transcripts

[0262] Gene trap vectors of the current invention were introduced into ES cells. A selection protocol was employed to identify cells with a copy of a gene trap vector integrated into their genome. Hybrid transcripts were identified and isolated from the cells following selection for sequencing of non-vector sequences included in those hybrid transcripts, i.e., sequences from the mouse genome and trapped in the hybrid transcript (trapped sequences). These assays were carried our as discussed herein and in United States Patent Application Number 20050059060, which is incorporated herein for that and any other purpose. Each trapped sequence obtained is believed to represents at least a part of a gene or an entire gene that is expressed in ES cells and/or other cell types. Thus, each trapped sequence is believed to be a sequence tag or sequence identifier to identify a gene in a mouse, or another species that is sufficiently closely related to mouse. Trapped sequences are shown in SEQ ID NOS. 19 to 4317.

[0263] The present invention is not to be limited in scope by the specific embodiments described herein, which are intended as single illustrations of individual aspects of the invention, and functionally equivalent methods and components are within the scope of the invention. Indeed, various modifications of the invention, in addition to those shown and described herein, will become apparent to those skilled in the art from the foregoing description. Such modifications are intended to fall within the scope of the appended claims. All cited publications, patents, and patent applications are herein incorporated by reference in their entirety for any purpose.

The application's sequence listing, which the Patent Office published only in electronic form, follows.

SEQUENCE LISTING (4317 sequences)

SEQ ID NO: 1 - DNA, 52 bp, Homo sapiens
ccagtgagcagagtgacgaggactcgagctcaagcttttttttttttttttt

SEQ ID NO: 2 - DNA, 23 bp, Homo sapiens
aagcccggtgcctgactagctag

SEQ ID NO: 3 - DNA, 22 bp, Homo sapiens
gaatatgtctccaggtccagag

SEQ ID NO: 4 - DNA, 23 bp, Homo sapiens
ccagtgagcagagtgacgaggac

SEQ ID NO: 5 - DNA, 18 bp, Homo sapiens
ctagctagggagctcgtc

SEQ ID NO: 6 - DNA, 23 bp, Homo sapiens
ccagagtcttcagagatcaagtc

SEQ ID NO: 7 - DNA, 18 bp, Homo sapiens
gaggactcgagctcaagc

SEQ ID NO: 8 - DNA, 20 bp, Homo sapiens
ctgtaaaacgacggccagtc

SEQ ID NO: 9 - DNA, 312 bp, Homo sapiens
  misc_feature (1)...(312): n = A,T,C or G
gactgagctgcagaagatntaagtaaacaagatggcttcaagacagtgaagactaatgagacagaataccaggacccaacagtgaaagagcctggcgttaacacaacccttcaagtgcgtttctttgggaaaagaggagaaaaaaaactccattataaagaatttccgaagatttatggaaaatttacaaacagaagttcaagaaatggaattccttcagttctctaaaggcctgaatttnatganaaaagaagactttgcagaatggctacttttcttcactaacactgaaaataaagatatttacctgga

SEQ ID NO: 10 - DNA, 492 bp, Homo sapiens
actgaggtacgccatcatacgcaccctgcgcttggcagacggccctgacgaagtccacctctcagcgatcgccaagatggagcttcaggaccaagccagacggttgacagccaggatgtgatggagcaacccggggcacactcttgaccagctcaaaacttacatctcacatctcttgagtagtttgagcacaaggctaattattcacccatggtaaagattttagcatctatttcgatcactgggttttataatgttaagtaaggatcacacagacgtgaggtaaataggaaaccccataactgccattgagtctggtgtctaatgggttagcattcgctttatacacgtgacctgtgatgaggtcacactgagaatggtagagctatttctggaattcagccaagtgaatagacaccccaggcctaaataaccttgttctgaaatacttgcagctgtaccccttttagcagtgttttggagcttaattta

SEQ ID NO: 11 - DNA, 297 bp, Homo sapiens
  misc_feature (1)...(297): n = A,T,C or G
accttctatggtctgcatcaggacttccccagcgtggtggtggtcgggcttggcaagcnatcggctggagttgatgaccaggaaaactggcacgaaggcaaagaaaacatcattagctgctgttgcagnggggatgcaggcaggtccaagacctggagctgncgtcngnggaggtggatccctgtggagatgcgcaagntgctgcagaaggagctgngcttggtctctatgagtaccacgacctgaancagaagaagaaggtggctgtgtnngcgaagcntccacggaagcggtgat

SEQ ID NO: 12 - DNA, 558 bp, Homo sapiens
  misc_feature (1)...(558): n = A,T,C or G
tttttttttttttttntctntantacatcacgctgctgcgaaaccccggatcncgctacctgagtgaatggcgacatgttcagctgtggggccaagngccnagacctncttgcacatgngtgactgggctgcacaccgaccccagaggagcgtgncgngctgntacnagggcacagactggncnggcctgcacnntgcaggagttcatggattgtccctataacctggctaacaacacggcaggttgcgcatgctggccgacctcagtctggtggnctgntacaacctatctttcatccccgagagcangcgggcccagnatgcatgctggagagcgccnagaagaacctgagaggnatggncttattcggnctcactgagttccagcgcaagacgcagcacctatttgagcggacgttcaacctcaagttcatccggccattcatgcaatacaacagcacgcgggcggtcggtgtggaggtggatgaggacactatctcgccacatcgaggagctcaacgacctgnacatgcagctgtatgactattccaaggacct

SEQ ID NO: 13 - DNA, 241 bp, Homo sapiens
gagtgttccctgagtgtttgtgctgggtgacggagtcgctacgtggcatgactcaagtttaagcattccaaggctctacctgcagcctgttttacacctctgcgagcagctggaacgtggaagcgttagcatcacctggaatgtttcaggggaccgagggaccgcgcttcggatgctgttctgttttgggtgaatctggctgagaacattaaagagcgaagtcgtgctcacaaaaaaaaaa

SEQ ID NO: 14 - DNA, 549 bp, Homo sapiens
  misc_feature (1)...(549): n = A,T,C or G
actgaggagtgtgttccagagaacctaaactgaaaaagaagatctttgcccagctggaccgcattgtggatgaccggnttatcctaagcagctccagctnttgtctgctgccttccaagctgttctcgggcttggctcatgtgaagcagtgcattgtggctcatcctgtcaatccaccatattatgtccccctggttgagctagtgccccacccagagacagcatccagccacantggacagaacctatgccttgatgaagaagattgggcagnccccagtgagagtcctgaaggagattgacggcttcntcctgaaccgcctgcagtacgccgtcatcagngaggcctggagactggtggaggaagaaatantatctcctagcgacctagacctggtcatgtcagacgggctgggcatgcggtacgcgttcatcggacccttggagactatgcacctcaatgctgaaggtgtgattagctactgtgagagatacagtgaagggatgaagcacgtcctcagtactttcgggcctgttccagagttctca

SEQ ID NO: 15 - DNA, 509 bp, Homo sapiens
  misc_feature (1)...(509): n = A,T,C or G
ttcttcgttggcttcatcttcctgnggttcttcttctacatcctgatcaccagactgacaccccttcagtacgacgttcgcctggctctcaccgctgtagctggcagctttggtggcctcctcctggtggcttcatggtggcgattcgggatcctcacactctgcatgcttgtgcgtgggactcgtgcttgggcnttcctcgtgtcttctgggactttcttcacgcctctgggaaacctaaatgtttttcatgatgatggagtgttctgggtgacgttctcctgcatagcgctgcttgttccagtcatcttcatgggctgcctaagaatcctgaacatcctggccttgtggagtcgtgggctcctactccgtggtgttggctgttaacagttacatgttcacaagcctctcctacatnaccctgaacgtcctcaggagagctcttcaacacagatttcccgaggggcttttnattngagtgccttttacagaccaacgactacatcatt

SEQ ID NO: 16 - DNA, 171 bp, Homo sapiens
  misc_feature (1)...(171): n = A,T,C or G
cctccagcccagcagttttggggggctgcagagatgattggtcccagttacaaagggacattcacggtcactctccaggaccttcttgagtaacagtgtttgactggaaccatatactngtgaactctccaaggtaaaataattaaaatgattttaatagacaaaaaaaaa

SEQ ID NO: 17 - DNA, 282 bp, Homo sapiens
tacagtctttgtagtttgtaatgaatgtgccacatacaggttttgtagcttattattatggaacagactgaagatctgcagtacgaatgtaatacttataaaggtttgcattaatgaggattacacagaaaacctttgttaaggacttgtgtagatctgataattggcaaatttttattttaaaagtattcttacagaagagttccatttaagaatgttcaccttataggaccaaaatataaataaaaactttcaaatatgtttgattttaaagaaaaaaaa

SEQ ID NO: 18 - DNA, 172 bp, Homo sapiens
  misc_feature (1)...(172): n = A,T,C or G
acacagggcaccaacggagacggntcgcntngagctgagggtgccttancgacctnctggacagacccgcccgcgccatgcgctcgcacactggcctgagggcgcttgtggcgcctggttacccgctcctccttctatgtcttctggcggcgacgcgccctgatccggctga

SEQ ID NO: 19 - DNA, 464 bp, Homo sapiens
  misc_feature (1)...(464): n = A,T,C or G
gatgacatcatcctctgcaagagagcatgggtcccaccactcctagggagnngannaacacatgnggcgatcanaggatntntatcggaagccagctntntccttttattatatgggtcccaggaatcaaactcacatcataggcgccttgatggaacatgcctttaccctntgagccatntcacagcccaaagcatgatgttttatgcagggatttaaggcccgatgtccacctgccctgtcaactgagctttctagatctgggaactttgaattggtagtggctaaatcactttcccctccggatctttacagctttccctgcgaaatatgggtcacaatctctcatgggctgtcaggacatcaaacaaaggagcaggagttagaaacatttcccaaggctgattccaagtcttccagccccacataataacaggtccctatcctaaggcacagagaggacc

SEQ ID NO: 20 - DNA, 149 bp, Homo sapiens
  misc_feature (1)...(149): n = A,T,C or G
cgagaccacactcaagttnccgtgccgngnccgaagacagngacgtnaggttcacctgcattgtcacaggatacccagagccngnaggtgacctggnacanggatgacatagaactggaccgccactggggcttgccaaaatacgagat

SEQ ID NO: 21 - DNA, 321 bp, Homo sapiens
  misc_feature (1)...(321): n = A,T,C or G
gggaatcgacatctactagggancatttgtnagagaagccacganagactcacgcagcccagtaaaggcttgcagtacggccagattcggaacagcgtcaacactatacatctaatatgctctcctgggngggcttcccttgttcccagaataagcctgccagcagctatggccagcctctcagcccctctgaatggntgttatctntcanccctcttggaacacattatggnctttgccaagaaagctgcaccttgagatggctgctgagaacccaagaagaaagagaacaccagagagcagtttccagagggcctgagt

SEQ ID NO: 22 - DNA, 345 bp, Homo sapiens
  misc_feature (1)...(345): n = A,T,C or G
tttctggggtaccggacctgcagtgccacttcctgggccaagcatatacaaacatcaccatcaccaccatcttccacacttcagacgctctcatgttccaccagaccgatggcgtcatgttccaccagacgatggctatgctccgtcctttttttcttcttttcctagcagtctatattcagccaatgtgggtcaccttataanattgcaagttccttgagaacaagggttgttttaatcaagcatgaaaatanaagacaaagcaaagttactgngggggcagntactatgttgnaaccaggcagttgataggatctgataattntagcctaccaatatcaggcc

SEQ ID NO: 23 - DNA, 111 bp, Homo sapiens
  misc_feature (1)...(111): n = A,T,C or G
caggactcagagcagggctactgcgctgagcataagagtacttgtctggagctggagagatgatggctcanngggtaagagcactgactgctcttccgaaggtcctgagtt

SEQ ID NO: 24 - DNA, 114 bp, Homo sapiens
  misc_feature (1)...(114): n = A,T,C or G
tgtggacgtgtgggctgttttgaaattgaactnaatgtatttctcattatgctatggctagggatggcccccacagactcatgtgtttgaacaaacctatgggggccatgtgag

SEQ ID NO: 25 - DNA, 408 bp, Homo sapiens
  misc_feature (1)...(408): n = A,T,C or G
ctgttgcgggaggactgtggtacccaggatgncntnnangtcccttaatttcggncctnagcttgncaccatcatgtatacgtntccttnatataagaanggatcctgacactntnctnacatggnagcagngaggagaatggctncctgngncattgcccttgctggcnnnaggcctnagaatccctttncctcaggtctgngaaagagggagtaangcnttcgnactcagntnaaaggacacagaacnnaactnggcaggccagctacatacaaaacaaattagcaaacccanctaacacccagaaaatagtagatataatagatcacagaacagactctcaaggnctccagatactaagataaacagcatggattacagagcatttgtacattgaaaaaaaaaaa

SEQ ID NO: 26 - DNA, 180 bp, Homo sapiens
  misc_feature (1)...(180): n = A,T,C or G
ttggagccgggcctggagtacccacccttcgatgaggacgacggnccggtggattgcgactgcccggtctcctgctaccgcgggcaccggnggtacaggaccnagcactggnccagcagctctgnatccgncccctcccaagangaagaagataaagaaaggcagtcatcggaggagccg

SEQ ID NO: 27 - DNA, 190 bp, Homo sapiens
  misc_feature (1)...(190): n = A,T,C or G
ctgaggtcgcagcctggccngaggccatanttacttcttgcggaactctcaanggtggcacaggaagcagcggatgattacataaaanganatgnacnangttcatacattnttgtatggaagggaccttgaaaatncagtacatgcaaagctgcatcattaaaattgcatattagtaacataaaaaaaa

SEQ ID NO: 28 - DNA, 207 bp, Homo sapiens
  misc_feature (1)...(207): n = A,T,C or G
tgagctagccagatggacggtgtcctgagggatcaacacactgagacaagcaggagtctgacctcaggcgaggggacaataccgtgaagacttgagcacagcacgcgggtgcacctgttcagtctgagcactcagggccaaanggatctctatgcgttcgaggtcagnctggcctacatagcggagctnngagacagcccaggctgt

SEQ ID NO: 29 - DNA, 271 bp, Homo sapiens
  misc_feature (1)...(271): n = A,T,C or G
gactgagacttcggtcgattggcagaagccttgctgtttctactggattgaatgccctcgctgatttgtgtgaactgaactgctgatgtcctaacancaaagattgggattgtcccaaagaactatgtctaaacagggccacatccccatttgccctactaacctctcctttcccctacctctggngggtagnggcattagaaggaaggttaaagtgtttaaaaactcttactaaagtaggttttgaaaaatataagcctacaccaaggca

SEQ ID NO: 30 - DNA, 182 bp, Homo sapiens
  misc_feature (1)...(182): n = A,T,C or G
gatgtcccaggctccggacaacctgcaagccagagacgctacagaaactggaaccanaccctggtgggctnccanaaagaangaatgactgnnagancnnncgaangagagnganagnaatantaaagnnnaccccgggggcttccaagcctatgagtggagagggaggcccacttcctggt

SEQ ID NO: 31 - DNA, 312 bp, Homo sapiens; identical to SEQ ID NO: 9
  misc_feature (1)...(312): n = A,T,C or G

SEQ ID NO: 32 - DNA, 465 bp, Homo sapiens
  misc_feature (1)...(465): n = A,T,C or G
ctgaaggggccttggctgctatactgtgcggatgtgagctgcagcttttangttntcccctggtgctgggtcatanngctgcagagaangctcantngctaaangtgcctactgagggagtgtgagaacctgagttcacatncatagaaaccactttaaaaagccancaacagtggcagangactctgnncttgtacagaaaggggaggtggagacagganattcccanaagccaatcagctagcctggcacacacaatggaaaaacagactgtctccaaaaaacaacagcagcaaaaccccacaaaaggcagaaggagagtcttctgtactgagctggaactgcgccccccatcctgccgccacctggtggtcacagaggacaaagcacttatgtagtgccttctaccgaaggacttaattcactgggtccctgaataaattccctgaagcctaaaaaaaaaaa

SEQ ID NO: 33 - DNA, 291 bp, Homo sapiens
tgagaagactcaagtctccttgagggatggaggcagaggccagtttctagccctattctttctgagcttattttctcaaaccccaagatgacaattcaggatgtggcccagtcgtctccacggcagaggagaatcttgagacccaaaccttgatccaccactgcccatctgtgggacttggggaaggccacttgatttggtggagagattgtttgaacaaatttgggaggcctgaagcctggcactccccattttaacaaaagcaacagtttttccctccaaaaaaaaaaa

SEQ ID NO: 34 - DNA, 453 bp, Homo sapiens
  misc_feature (1)...(453): n = A,T,C or G
tggatgaagtgtgtcactgngggagtggtcctggctgcctatgaaaantaatcnccttntgctgcctgcanatcaagangtactaactctcagcttcctctagcaccatgnntgcctggatgctggcatgctnncgccaggatgatnacgnnctgnacctctaaccttctttcanactttcccaccaagataatcatnngcatgcctattggcgatcctttttcaagtctnccagacactgnaagngagagcttcctgncctgagagaaagcttgnctagtgacatcaccctgcatcctatncagctgcctctccttntcaagagaaacnantcccacagatgactcgaggctgttatttcggnancaatgacctgaagatntgggngnnnaactcccctacaggannngattcaggaggccttgcaggttcccaggcatctgaaagccacgt

SEQ ID NO: 35 - DNA, 450 bp, Homo sapiens
  misc_feature (1)...(450): n = A,T,C or G
aacctcgccacagccaacatcactgtggaggactcttgcaaccnncatcatctccaatggcaggtgcatcagacctaccacttgaaggccagcgtccgaagtagagcgtnagcgctgggtgacagccttagaactggncaaggccaaggctgtgaagatgctggccgaatcanatgactcaggagatgaagagtctgtctcacagactgacaagaccgagcttgcagagcaccctgcgaacactntncagcaaagtggaggacctcagtacgtgcaacgacttgatagntaagcatggtaccgncctgcagcgttccctcagtgagcngnagtccctgangctgcctgntgnnagcattgagaaaatcaagcatgtcagtgaacnancccncgcttttttaggataacatccaangccgtgatnaatgtnaggaaaagaagggtagcccc

SEQ ID NO: 36 - DNA, 408 bp, Homo sapiens
  misc_feature (1)...(408): n = A,T,C or G
atccacatggacagccacagtatcttcatgaagttgtcagagccgatgngacttcccatgagacagcnggctgaacatcctacaagccantatcagccttccctggatcaaggcacacagacccatggctctgagaagcactctgtgttgctaagcanggggtgcaaagngacaggaggggaccacatgggctaaccttggcacccaggaacactgaagncctgatcctggcacctgnggatgggacattatggaaggcctatctctgtggctggaatgaagccggnaagtttgagatgggatntttctanangatgagatgatccccacgtccgtgggaagtacancgcactganattcaccccnactctgagtccacaaactggagtattaaccccaacacctgtg

SEQ ID NO: 37 - DNA, 212 bp, Homo sapiens
  misc_feature (1)...(212): n = A,T,C or G
tgctgcccccctgcccaaggccgaagactacttgcttctgngatggctccgagcnnggacactttgaccttangaaatctgaggacatgctccgaaagcatgnggagttccggaatcagnanaacctgataccagatactgacgnggnaggcaccagaggnganccaactntatgactctggnggactgnntggctatgactacgaaggctg

SEQ ID NO: 38 - DNA, 313 bp, Homo sapiens
taaactccacaaggaggtgtccagcgttcgtgcagcccacagtgagagagtggccaagctcgtgttccagaggctgaatgaagacttcgtgcgcaaacctgactatgcactgagctctgtgggagcctccatcgacctggagaagacgtccagtgactacgaggaccagaacactgcctacttctggaaccgcttgagcttctggaactatgcccgcccgccttctgtcatattggagccagatgtgttccctggaaattgctgggcttttgaaggtgataaaggccaggtggtgatccgactgccaggcgcg

SEQ ID NO: 39 - DNA, 125 bp, Homo sapiens
  misc_feature (1)...(125): n = A,T,C or G
cttctgcctctctgagtgctgggatcanngatgcgnactacccccgcccaactgagaaccaatttttattgaagaanattgtcntntgcttaaggaangcctctnttggaagccaagggaccata

SEQ ID NO: 40 - DNA, 212 bp, Homo sapiens
  misc_feature (1)...(212): n = A,T,C or G
agaggattatggagagaggaaatntgagagcgactccccngtagacttgatannatggcagagcactagnacatngnnnannggccnngttacagatctnccggacacacncagcacggggctaactcggcaatccaggtcatttatattgtggtggctactctgacatccntagatattcacagngtccacttccggcttggcacaacact

SEQ ID NO: 41 - DNA, 521 bp, Homo sapiens
  misc_feature (1)...(521): n = A,T,C or G
gactgagattcgctttnctnaggccccactttctgggcgaccacatttcctttgaggatgaccaagcctctttgcctgcttncttccatccncagtcatgccgggtccacggnggcagctgggncttgtttgaggacnatgaacntngaggcagaccagcacattgtggtcacagggcggagttccncaatctnacggccatgggctgnctnggcctccacggtcctgggctctntccggaaggttcctctgcncttttcagagccttccctgtccctctttggcctcgagtgtttcanagggaaaggagatnggagcatgactggggaggtgcgaagcctgcaagccgagggcttcaacaaccacgtactgtctgagcgcgtcaaaggcngtagtctgngtanngtgngagcacananacttccggggccgccagtggctanggggcanctgtgagatcaccancatgnctgacctacagcggtacccagagggtgggctccctctaccctatcaaacag

SEQ ID NO: 42 - DNA, 116 bp, Homo sapiens
  misc_feature (1)...(116): n = A,T,C or G
attgaagagggcttatgaagcaggagcacacttctgagcgnctcacaagtgtcanatgtgngntggnagnanaagcgggccnnccgnccntggaacctcttcctagctacctgcca

SEQ ID NO: 43 - DNA, 450 bp, Homo sapiens
  misc_feature (1)...(450): n = A,T,C or G
tgcccggggccctcancagagcgagctctgtattgnntgaattncccatccctgtcccccgagttcaataaganctattncctttatganagcatacaaaantanggtgnagatngtcgcatnccngnanncgacctacnaagnatcantcacntttggggagcactnaaaactttatatagncacactggaagacaatttagcaaggtctgnnaagattctcttaccttagaatgnancngntctattccatgngattctacaaggaanctctcccttggatgcaaagaagggaggggcatgttcatctgcaacagaaaactgcctnaaataatgtaaagttccatcaacatgctgaatgatgaaactgtgtgatcccagntcagntaaacaagagagtgtgccctaggccccaagntcaacagtgctacnaatgaatgaataaatgag

SEQ ID NO: 44 - DNA, 492 bp, Homo sapiens; identical to SEQ ID NO: 10

SEQ ID NO: 45 - DNA, 153 bp, Homo sapiens
ccctcgcccaaagggaatttcaggccaatatgggatatacgaagccacggttttaaaagaaacaagcaaagatggtcaccagaacacttgccaggtccttgatccttcaacaccaccattggtatttctttttttaaaattatcctatttcaa

SEQ ID NO: 46 - DNA, 182 bp, Homo sapiens
  misc_feature (1)...(182): n = A,T,C or G
caaagcccccaaccaaaaccngaagcccgacaattttcggggnnccnnaancccccgaaccccacaccggggcacccgngggaccagggcgccgnngnaggagagaggccaaggncncagggggagccacaaggggcggggggaacgnnaaacggagngaacngccagaaccagaccgaacc

SEQ ID NO: 47 - DNA, 154 bp, Homo sapiens
  misc_feature (1)...(154): n = A,T,C or G
tgcctgggtttttggatggctagntggatnaagacacctgctgtcaagcctgacagtctnagttcaattcctggactccaccctgcaaaccatctcctgacctctgtgaggaaaccatggcatgtgtgtncctctccccagtgaaaaaaaaaaa

SEQ ID NO: 48 - DNA, 276 bp, Homo sapiens
  misc_feature (1)...(276): n = A,T,C or G
tgaacatacacactcgnttgtacangcacgtgctaacatggactgcgtagngtcacagacagccagcatcngagaggttgagcaacttcggccatnaggaacagnantaaaaccaggaagtaactcggtgcaggggcgtggangttccctacnncataagtgctgngggactgngtgtgcgtgcgtgcagctgtgcgtnagcgccacagcccatctgactgaagtcctcgtcagacacaganttttngctgcttaacgngacaatagcacacacca

SEQ ID NO: 49 - DNA, 488 bp, Homo sapiens
  misc_feature (1)...(488): n = A,T,C or G
gactgagctcctctgccttttacccaagttggncatgagatgtcagtcagctgttctccacccacatgctcctgtctcatgctctgcctcaccacggcccaagactgtcaaggatcgtggatgaaacatctaaaccacctccctaaagtggttttctccagtattttgtcagacatgtgcagcctttgttctacatcaacctcagacaagatgaattccacttgatgcgatgcaagttcattcaactcccacgtgttgaagatgtatgatgaccacaggtctacagggaggaggtcttggtagaatgaatgacagctctgttagtgactgtgaagtgacagaaaatgtggtggacgtgccaagatggtccactccaacaacttggctttgttttgaattaaccagagttaagctaactgtctgatttgagcagacagaaacaggggaatgactgaagaaaaactatttaataaacaaatggactaatt

SEQ ID NO: 50 - DNA, 419 bp, Homo sapiens
tgagtgaagctaggcccatcccgcaccgttcttccatcctgaatgtaaatgtgatccatgataccgcccaggagcagggagactgggagcaaccaagtttgaaccacagagtgttacccgtccccattcaacagatggcatctacacgatggcctgagaggacttagttgcaccggtccatttggagacagcacctgccccttctgagcttttcagctacaaaggaagctggctggagaagccagcagctggaacggagctggagactaggaggctggaagacactgaatgagccgtgaaattgaccagttaaagttaagccctttcacctgctagcacggaagctctgctcactggtgccaccggaagttcagatgagcctctggcacatttaaatagatacgctggtttccttggat

SEQ ID NO: 51 - DNA, 137 bp, Homo sapiens
  misc_feature (1)...(137): n = A,T,C or G
gaagtgccggaagtgatcaagtacctctgccggcgagcctcctacatcagccaggagaagatctgcccntcagccccatctccctcttctagtggtctgttttgcaaataaacggtgtttcccccaaaaaaaaaaga

SEQ ID NO: 52 - DNA, 255 bp, Homo sapiens
  misc_feature (1)...(255): n = A,T,C or G
tgacttcccactctcaagccactcgattgggcttcctaactgcagcagttacagggacccggatncnacgccagnagtccacccgtcacggcacgccanccacagcgatgncactccactgagagcgcacaccgtagacgcggacgccgnnggncaagatgtctccgccatcnccacggngacggacggacggacggacatnnacaagngtccaccggtcactgccgccgtccacanagatgtcgaccatgagag

SEQ ID NO: 53 - DNA, 112 bp, Homo sapiens
  misc_feature (1)...(112): n = A,T,C or G
gactgaggtgggttatggtgctgnggtanagcntgggctgtaggccnnanntanttattgagggaantctcnacggattggcaggaagcanggctggttccatatataggga

SEQ ID NO: 54 - DNA, 520 bp, Homo sapiens
actgaggtttataggaagatccagtacctcgctcgataagaaagacgaaagcagaggggtgtggatgctggagggagcgcctcggaaggtgcctgctcaagggaccctgttctcctcagctccagtctctgcagcttcaccaatcccaagtccttccacagatccccaggactcggaagaactcagcttaaaaatcgctggacagagccacggggcacggggagaggccgttgttcccaacttacagatgagggctcttcattgagtcagagtccagctgcctcccgaggtcatgagaaagaaggcgagggcaggcacggggcacaggaagtggagccggccagctgggaggcagcagcaggcgcgggtactgtggcctcctggatgggccagtgacatcacaaccccaggaaacagctgcccacgagaccctcactgtccctcattcctccgctgggaaaactggccaccagctgttccagtgccattcttactctgcctcttcctagattgtccccgt

SEQ ID NO: 55 - DNA, 250 bp, Homo sapiens
  misc_feature (1)...(250): n = A,T,C or G
cattccatgagaggagacangtggcaangtccggtgtccccgngagccctgaccgtccncgncncgaccntaatnngntctctntcggnaccgaaaacaaaaccctttgcttgngatncgagccatggngaagctgcaggaggaaaacgggtgcaaggaggcgccaggctgggccgacgaagtgagactggctgcaaataagaaaatcatagttaatcccagcacccgntaggcagaggcaggcggagct

SEQ ID NO: 56 - DNA, 470 bp, Homo sapiens
  misc_feature (1)...(470): n = A,T,C or G
tttgatccttctgatgcagcatcttcttcagagtggccacctcttccttcagctgagcaatgatgacaaagtggtcagtgcctggggaatccagagccaggtctggagaaaagctggagagaagaggaagagggaaatttcataacttgaatggaataacgtttctacttaaggatgcacttctggtcctgaactccaggncacttgatggaagaaacgcatnncancngcctttccactgcactgcttcctcctagttaccnagtcaacccctcctnaggctggngctggaaggntccaacncctgacnanagcacagcctgcattctgtgcacactanncaccgggaacaacgcagccgaggnagancagactgangcgcccctaactgatacagggngagcaggagccagtcaaagcaatnaagnctgcnctcaggcgcctccaaggccagatctacaaaaaaaaaa

SEQ ID NO: 57 - DNA, 130 bp, Homo sapiens
  misc_feature (1)...(130): n = A,T,C or G
cagagggaggagccgctgtcccacacacgcccgagcaccagacagatcgcaagccnnncctgagagcctctgcgccncttgctnctgagacagagtctgcntgcacgtaatatggactgaagctggtcat

SEQ ID NO: 58 - DNA, 104 bp, Homo sapiens
  misc_feature (1)...(104): n = A,T,C or G
attttgcggaaccgggccangccattttacnagggaaccctagggcgantanccncngcnggcgccangnagaagggactgcacggaagggaacaagggcccaa

SEQ ID NO: 59 - DNA, 213 bp, Homo sapiens
  misc_feature (1)...(213): n = A,T,C or G
gtgacttctggcacagttttgacanggngaccagtcaacaaagaagactctgccctcaggagccctntcagagaccctgaaatgaacatgaagttggatgcataaagagaagtatctgggaggagttggggctagggaaaagcatangaaaaaatatattgcatacgtaattttaaaanganacattaaaataaagaatgaatatatacgata

SEQ ID NO: 60 - DNA, 120 bp, Homo sapiens
  misc_feature (1)...(120): n = A,T,C or G
acatcctagaccttgtttgatncagcgacaacaatccccctgaccatgaggagctgatgatccattggttagagaagcgcagcctaacattcagcaaataaatgcttccagaaagcaaaa

SEQ ID NO: 61 - DNA, 332 bp, Homo sapiens
  misc_feature (1)...(332): n = A,T,C or G
aaactgcagcatttaaagcagctaactaaaagttgactatcaagcgaaacactgtagcatttgcaaagccctaaagccngtgagcgtcctgaacaggaagtctatgcgtggtgtgttcggctctgggagaaaacatgaaataaggaagtcccaagctgagatctgccacctgccctggtatacttgtgctggctggaaaccacnttcatctcctccagttccacagcaggagtggatccagggtttatggaaatattancttatggaatttgagaggccgttttaaaaaagcttatgaagtttcccaaaccatgggaacaaatgaaaaaaaa

SEQ ID NO: 62 - DNA, 297 bp, Homo sapiens
  misc_feature (1)...(297): n = A,T,C or G
tgactcagcgaaaccacnagagctaactgttaganntctgctcnagcggagctatgaagatatagatgcccgttactccagnatcacccccccagcaccnncntgaactctnattgacgttcgcttccccatggganacctntgaaaaaactcataaagngctttttatannctgnnagatgcaagnnnctncagcatcacccccccagctncccnntnaactcnattnacttccttccccatgggtacctttgaaaaacctcataaagtgctttttaaaacctgcaaaaaaaaaaa

SEQ ID NO: 63 - DNA, 165 bp, Homo sapiens
cctgcgagctaactgtcaagaagtcgctcgagcggggctagaaataaagatgccgttcctccagcatcacccccccagtccccccctcaactccattcacttccttccccatgggtacctttgaaaaacctcataaagtgctttttaaaacctgaaaaaaaaaaa

SEQ ID NO: 64 - DNA, 156 bp, Homo sapiens
  misc_feature (1)...(156): n = A,T,C or G
tgaggaactaggaaaagtccnagggccatcagcattcaatgggcatgaagctccccggaggcctggaggtgaggctacgttgccaaggaccggctctctgaatggcttgggtgtacactctcaaggtgaatggagtccatcaagctggttggaaac

SEQ ID NO: 65 - DNA, 116 bp, Homo sapiens
  misc_feature (1)...(116): n = A,T,C or G
cgatacatcaccaaggcatggtctgggactcttgatcggcctgactgntgctgggttagaggtgtgccccaccacccctggtggagcccagggcactgtagcatgctaagctacta

SEQ ID NO: 66 - DNA, 441 bp, Homo sapiens
  misc_feature (1)...(441): n = A,T,C or G
aaacactttaaaaatcatgtcaagctcaattgaacagaaaaaagggtctacgagacagcgtaaatgtggcttttgnttggcaanttttnacaaggaatgtaggacagttacgtgatatctgaaaaccagaaggtggcagcacaccacaagtgcatgctgttttcgtctgctttggtgtcctcacattctgataatgagagtcttggtggattttctattgaagatgtntcaaaaggaaattaaaagaggcacaaagctgatgtgttctctttgtcattgtcctggagcaaccattgnctgtgatgtgaaaacctgccacaggacataccactaccactgtgcattgcatgataaagctcacatccgagaganaccttcgcaagggatttacatggnttattgncnnaaacacatgaaaactgtcataacttcggaccccga

SEQ ID NO: 67 - DNA, 187 bp, Homo sapiens
tgcttctcttctgcctctgtaacgaagaagcctttgggagacaaagacaagaggatcgtgtagagggcagcctggtctacatacttcctgttcctgcccccatgctgtgccttcctgccctgaaggattccaatgcccctggagccataatttaacataaacctttcattcctttgaaaaaaaaaaa

SEQ ID NO: 68 - DNA, 297 bp, Homo sapiens; identical to SEQ ID NO: 11
  misc_feature (1)...(297): n = A,T,C or G

SEQ ID NO: 69 - DNA, 114 bp, Homo sapiens
  misc_feature (1)...(114): n = A,T,C or G
ttttttttttattatgtagtaacgantgggctgangnagcancctggnccagaangccataangtncttnttggggancnctgaaaggatcggcacaggaagcatggcttggtt

SEQ ID NO: 70 - DNA, 170 bp, Homo sapiens
  misc_feature (1)...(170): n = A,T,C or G
gactgaggtggggtctttnctccctccctggntatcgtantggtccacagaccagcnnctggngcccatgtggaccatggncagctgaaggtaccccanctggcgactactcagacccacatcgnaactcctgattaaacaagactgtgaataaacctctgacacttgct

SEQ ID NO: 71 - DNA, 144 bp, Homo sapiens
  misc_feature (1)...(144): n = A,T,C or G
tatacatttggaattctccacantannangaatgaannancaaagccaantgggccagcanccagagtggcgccaaaggcacagctcggagccctctcaccagctacataataaagtaattatgggattagggaaaaaaaaaaa

SEQ ID NO: 72 - DNA, 259 bp, Homo sapiens
acagtaacagcttagtaggataatgaagacacatgcagaggacttgaactctggacccttgcacaggctcaccatgatgatcaaggacaagcagcaagtgaagaagagcctatgtaggcattcatcaacagatagaggcagagatgatcaaggtcacaaagacagaattggagaaattaaaatccagctatcgacaattaataaaagaaatgaattctgccaaagagaaatataaagaagccttagcgaaaggtatgac

SEQ ID NO: 73 - DNA, 160 bp, Homo sapiens
  misc_feature (1)...(160): n = A,T,C or G
atctgaagaggggggaactgnagcaagcacatatgctggngagngactcttagcaanggccntccacaaagaaacctgctntacctctgtccagggnntgaataccccacaaataaagaagtttggtattgagggaattaaaaactaaaaggccatagct

SEQ ID NO: 74 - DNA, 421 bp, Homo sapiens
  misc_feature (1)...(421): n = A,T,C or G
atgaggacagttttgnagncaatgaccgtgggaggcaggatgcctgcaaagaacagacatggtctctattcttcctctgcaaggacagacactggctatgagaccttcccctggaggaagtgagtaagcccctacctgcagccaacaggttttcctgaaagcagaggggagccttgctcctatacagctggctgagacacagcttcaggtgttgacagaccntntaggtcacctgcaccagggatgaccaataaaagaggccaaacagaaagccagaggcacctccctcttgaagaaggaaagaacatgcagaccagttttttgttttttttaattgtttaggcccaggaaatggatgggaccacatatgaccccttccatggacccagagcagacaaaataataaagtcttctaagctgg

SEQ ID NO: 75 - DNA, 137 bp, Homo sapiens
  misc_feature (1)...(137): n = A,T,C or G
tgaactcaggccctctggtangagcagccaggagttcttaactgctgagcnntctnatccagcccncaacntatnnttttnntcattgcggnganccgtgagcaatggccatcatgagcctccgctgtgcctaactg

SEQ ID NO: 76 - DNA, 253 bp, Homo sapiens
  misc_feature (1)...(253): n = A,T,C or G
gccagctcgaaagtgnngctacatatacctactacanagagggaagagaaanaacggccctaatancccccanctacttcactntctaaangatctgaaaggncgncatnnntgactncgacaacatcgncttgagtacccggagcctcttgctgttcatncaacaaagccgcaanctgttttggtanaattngactcanatcctcntgcnttctggacccatgtggtttcannnctggaaggagccccctac

SEQ ID NO: 77 - DNA, 146 bp, Homo sapiens
  misc_feature (1)...(146): n = A,T,C or G
gaactggacatgaagnaattccaaactcagaaagtgctcacctggcctggcacntctgatagtccaggtgtggngnggcagtgaatgcctgtgtggccctcagggtctnganaaacgaagacctttagttgaagactagactgagc

SEQ ID NO: 78 - DNA, 477 bp, Homo sapiens
  misc_feature (1)...(477): n = A,T,C or G
tgaggagaaagagtcctgaagcaaagacattttagagagaaaatactcaagggccatgcaagccagctgtaaccaactgcatgatcctccgggcactgcacatgaagatgctgcagcctccccgtgtggtcattcaagatcaacagaaggttcccttcaccctggggatgtacatatccaaataaactccggaccaaaagaatattntgaaaatccaagctctagaaatcccaggtcaggcgtctgtacttgtgcccatggatgtgtgcatggtcgtttccggagttactcccacagtgaagcaagaccacctgatgactttgccacagagtctggggaacatggaagtggctccttctcagaattccgctatctcttcaagtggttgcaaaaaagtcttccttatattttaattctgggtattaaacttgttatgcagcatataacaggtaggaaataaaactgctgacttacgtt

SEQ ID NO: 79 - DNA, 106 bp, Homo sapiens
gaggtttcccttgaaccagagaatgacaggacttggttggtttaatttttcaaataaaattgtttaagtttgaaaagaaaaaattaaaagctaaaaagccaacaaa

SEQ ID NO: 80 - DNA, 167 bp, Homo sapiens
  misc_feature (1)...(167): n = A,T,C or G
gtgagcaggaactaggctnagtggggcaagaagcacagcaaccagatctgtnatcctacgtcaccacctgcgagctgctttgtggcgttatggagccggtcttgggatgattgtttccagaagagcattctgtctagtacctacgnccctgtccaaagaaaagagag

SEQ ID NO: 81 - DNA, 283 bp, Homo sapiens
  misc_feature (1)...(283): n = A,T,C or G
tcagggctgcaccagggtnctggtggncgcggctacagccctggtgacnncctcctccnnctgcccgnaagnttgggagacctccaggggtacagtatggacaacctggcaggcccgtgatgctgtgctgccccggagngagcgctgnnactccagtgtcctggtttcggnatggngattcaaggctgctccagggacctgactctgggttaggacacagactggncttggcccaggtggacagccctgatgaaggcacttatgtctgccagaccctggatgg

SEQ ID NO: 82 - DNA, 257 bp, Homo sapiens
  misc_feature (1)...(257): n = A,T,C or G
ccgtccacagcaccatnctgcgcacaggactacatgcnttcgagggtgacaaacatnacccangaagcangtgnttttnctgcnnggccagcacgatgagcgcganaagtggatgnagaacctgaggcgagcagggcaccccaacnaggacaaccagcccggtgnggggagcatatcntgaagnctgnggcccgatcgangccaaggatcngccgnccnngaagaagctatcnatgggaacctgcgcctggacgatg

SEQ ID NO: 83 - DNA, 108 bp, Homo sapiens
  misc_feature (1)...(108): n = A,T,C or G
tttgcggtatacaaagctaggaanttccccagtgactnngngngaggatgcttcangcggggcacgcgagccaacnatggaagtngncaggttgactgaggcgtcact

SEQ ID NO: 84 - DNA, 226 bp, Homo sapiens
tgaggctctctcctaaaccgcttggacatggaggtgagtgtcctggagaagcatcgggaatcaggagatgctgctgagtgtatcgaggatcctcaggtcagacccagcctggaaacccacaggaagacattagtgcaaccatcggatctgattgttgacaggattcataaatcaaccaatcgttcatctgaacatatctctccaaataaatggaggaaaaaaaaaa

SEQ ID NO: 85 - DNA, 211 bp, Homo sapiens
  misc_feature (1)...(211): n = A,T,C or G
gacttacttcttcgctgcagtcctcattagtggtgttgtacatgaaattggacacggtatagcngctattagggaacaagttcgatttaacggctttggaatttttctcttcattatngatcctggggcattngttgatctgnncacnacccatttgcaacttatatcaccagtcncagcagctaanganattttgtgcaggtaataaaca

SEQ ID NO: 86 - DNA, 129 bp, Homo sapiens
  misc_feature (1)...(129): n = A,T,C or G
ccatcaatctctaatnaggaaaatgcaccaccggcttgctcacaggccagtccggtaagagcattttcgaaactgagctccagtttaaggaaangaagacaaaatctccatcacaatggatttagggta

SEQ ID NO: 87 - DNA, 139 bp, Homo sapiens
  misc_feature (1)...(139): n = A,T,C or G
tcctgtgggaactgaaaggacccgagaaagaattgaacgggtaatacaagaaacntcgattaaaacaaatttatacagcagaagaaaagtatgtgttaaaaaacttctgtgtattcaaataangttatttctagtaata

SEQ ID NO: 88 - DNA, 516 bp, Homo sapiens
  misc_feature (1)...(516): n = A,T,C or G
actgagacccaattctagggtttctgaatcacttcgcagcatctttcctgaaatacattcagacttggcaagcaaagaagtgcctggccacatcctgctggacatagacaatgacacagaaagtactgcattgtgaagaaagccacttgtcagcctttggccctccatcccagtgaacggaacntgggtcaggcaagcctctgtctctgcagaccaaacagtgagaagcttttagtgggggaaggaaggtctgactacgaaggactagactcccacggcccaaggagaaggtgagggccagtcctcaaagctgaatgacctgtgtcgtaaagaagttggcttgctttatctaggatgaaaatcatgccaaaaatgatcaggacaaagaaataccgacagcaggagtattactgctgagaggtgtatgggaagctgttgccagagctgtcagctcagacagctctgattgtgactaagaagagacttacctatctatttaataaaacattaattatg

SEQ ID NO: 89 - DNA, 367 bp, Homo sapiens
  misc_feature (1)...(367): n = A,T,C or G
gtgcgcattcctagtttggggtcatatccttgtctgacaactcaccttttacaacagaatctgcttttcagagagatgccctttgcttctcagatgtagtgcaccttacgcttatttttcaacagtgaaaatgagtcatacagaggataanntgaananaccttnagnanacaaantacgnggatgccgttcgtgggggacctaacaagaacatcagcggtctggaatantctgttacacanggaacatgagcgagacatgaatcttcgatcatcgtgatgaggtctganatcgcnaccttgantcncnnggnnatncttggctgaagatttacnctgcanagnccaagaatatctgttcatagaaa

SEQ ID NO: 90 - DNA, 129 bp, Homo sapiens
  misc_feature (1)...(129): n = A,T,C or G
tttttttttgtggtgtttatntggggggtgtttnttgttgggttttattnttngtgtgtttgttttttttntttntgttntttgnttaggtangcggagcgccccggggggncgggggggcggacgggg

SEQ ID NO: 91 - DNA, 367 bp, Homo sapiens
  misc_feature (1)...(367): n = A,T,C or G
agcaagattgaagagttaaaagctcaaaaagaattaagacagctgcaggaagatcggaagaatgacaagaagccgccaccttacaaacatataaaggtgaaccggcctattggcagggtacagatcttcactgcagatttgtcagaaattccccgttgcaattgtaaagctactgatgagaacccctgcgggatagactcagagtgtatcaaccggatgctgctctatgagtgccacccaacagtgtgtcctgcaggagttcgctgncanaaccagtgcttcagcaagcgccagtatccagatgttgaaattntccgcacattacaaaggggctggggtctccgaacaaaaacggatattaaaaagg

SEQ ID NO: 92 - DNA, 156 bp, Homo sapiens
  misc_feature (1)...(156): n = A,T,C or G
cgtttatgtctaccgtcctctcaagcacacnctggtaaccngagacaanggnncantcaaantacatccctcctctgtctcaggcccagatncntccaaggacaanagnaagccagaantgccagtccgaggtccagcagccttccactatgccat

SEQ ID NO: 93 - DNA, 319 bp, Homo sapiens
  misc_feature (1)...(319): n = A,T,C or G
ctcccaagaaaactgacaaagcgttatccagcatatgagttatatctttacggagaaggatcgtacgctgaagaacacaaaattctccctttgacaggaattcctgttctctttcttcctggtaatgctggaagctataagcaagttcgatctatcggctctattgcacttaggaaagcagaagacatcgacttcaagtaccacttcgacttcttcagtgtcaacttcaatgaanaactggtggcattgtatggnggaagccttcagaagcanaccaagtttgtacacnagtgcattaaagcgattctcaaactctaaa

SEQ ID NO: 94 - DNA, 146 bp, Homo sapiens
ttcctgccgaggggcccgtgatgtgtcgtccctctgggttacagctgagtcaggaccgtctcccccgcaccgccccccaacagaggcacccaattccagatgcctttcccaatatgaaaataaactgttaccgaaggaaaaaaaaa

SEQ ID NO: 95 - DNA, 117 bp, Homo sapiens
aaaggaccattgcctgtagcaccaggcttcggcaggaggctggctgcgagttcgaggaagcctagactacggagtcaaactatcctaagaataaacaagtaaatccaaaaaaaaaaa

SEQ ID NO: 96 - DNA, 554 bp, Homo sapiens
  misc_feature (1)...(554): n = A,T,C or G
tgaggcttcgcaagccgntcaggaggctgagctcaatgccagaaaggccaaaaactctgtcagcagcctcctcagccagctgaacaacctcttggatcagctaggacagctggacacagtggacctgaacaagctcaatgagatcgaaggctccctgaacaaagccaaagacgaaatgaaggccagcgacctggacaggaaggtgtctgacctggagagcgaggctcggaagcaggaggcagccatcatggactataaccgggacatagcagagatcattaaggatattcacaacctggaggacatcaagaagaccctaccaaccggctgcttcaacaccccgtctatcgagaagccctagtggcgagagggctgtaaggcagtgtccctgacaggggaccctgtgaggcctcggtgccttgacacaaagattacacttttcagacccccacttctctgctgctctccatcactgtccttttgacccaagaaaagtcagagtttaaagagaagcaagttaaacatctttaaccaggaacaaagggttttgcgtc

SEQ ID NO: 97 - DNA, 558 bp, Homo sapiens; identical to SEQ ID NO: 12
  misc_feature (1)...(558): n = A,T,C or G

SEQ ID NO: 98 - DNA, 205 bp, Homo sapiens
ctgagggcaagttcctgtgaaatctaccagaaccataatatcatcgctggtcttatctcaggcagaagcacacttcactggaaaccaaaagcagagaaaagcatgccatctgagtcacatcggtgggagccaacaaagccagtgaccttccagaatgcttctgggcctctgcaattaaatagagaacttgatttaaaaaaaaaaa

SEQ ID NO: 99 - DNA, 225 bp, Homo sapiens
  misc_feature (1)...(225): n = A,T,C or G
agagcttgaacttgggnttttccacgctcagccttgcaggtaactgagctgacaggcccgcaccaccaggcaaggttcaataaacngtgtattaaatgtacacatggatggagaaaatgagcaaaggccgaagcgatggtgatacacctgtatctggcttcatttcctactgcagagcaatctgtcagaagccagggagggggtgggcttctagaaaagaaaaaa

SEQ ID NO: 100 - DNA, 140 bp, Homo sapiens
  misc_feature (1)...(140): n = A,T,C or G
atgagtcttgacacagantggaaccatcaagggctacccctngntcatggtcaagggcnactcaaagagacanctnacccgtnaatcctgctatggaatntagaattcncagagttccgtgtgngtgcctacacagggtt

SEQ ID NO: 101 - DNA, 126 bp, Homo sapiens
  misc_feature (1)...(126): n = A,T,C or G
cctactcagatgaatggaaacagganggcccagncncaagttcangacctacctgnactagagagtgaatgaacagtttagtgaaatcctgtctaaaaatnaaaagtgaaaacgagaaaaagcaaa

SEQ ID NO: 102 - DNA, 243 bp, Homo sapiens
  misc_feature (1)...(243): n = A,T,C or G
atctgaggcagctgaggactcagcccaggtgaggcttccgcctgaaagatgagctaaagccagagggaaattccatccaggacctcacatgtgacttgttccaagggctctgaagacagaccttcaacaaagcttacttgggtttgaagatgaatgccaatggagacatacggtgttgattatcggactctgtggcaaagcatcgtggtttgataacagnaaaagtcggttctttccgaaact

SEQ ID NO: 103 - DNA, 330 bp, Homo sapiens
  misc_feature (1)...(330): n = A,T,C or G
aatgacccgaagcccagcctctctgccccatgaatgatttaacatcacggaggggtctgccagcttcctctgcagtggaggcctgtggccgtgacatcaccagccccccaccatgctgatggatggtcttttctgctctaatggtgaggagagtgcagagcgccgtctgggaggagattggcaccctctgcagacaggaagatntgacactcggtggccggatcctggatgcncaatcagacctganccattgttnactcttcaggctccctcagaaggcagcaggcananggagctcaaccctcggcttcctccattccactttgaaaa

SEQ ID NO: 104 - DNA, 107 bp, Homo sapiens
  misc_feature (1)...(107): n = A,T,C or G
catgctcatatagatgctatgctcacnaannatcaagnngatngtngccatcaaggaaactnaccngcaggctattgtgcgaggaccctagagtctgatgctgaaga

SEQ ID NO: 105 - DNA, 131 bp, Homo sapiens
  misc_feature (1)...(131): n = A,T,C or G
cctgtgaggtgagagagtactnnttcatncagggagctgcntgctagagtattccnctgcgcctgcttcctggcactggnctnactgagactttcangaangtgcctcgctctcaagaagagtaagctgat

SEQ ID NO: 106 - DNA, 125 bp, Homo sapiens
  misc_feature (1)...(125): n = A,T,C or G
aacgacacctgaagaggccactttgctctcgggcagggtgtcnctctctcngganaggaaagtctattatntttancgntnttaaaggctanttgtttgggagtncaccatgtactgaagacatc

SEQ ID NO: 107 - DNA, 314 bp, Homo sapiens
cagctgtggacacactgagaacccctgcctgtgtctcctgctctggaaacccccggccctctgctctgctctgttctccacagttgctgccagctctttaccacctcccaccactgggaagggaagctcggcaaccttgaagcacaggctggtcctccggttgccacctcttgtgtgtcttcttcggttttgagacaggatctgatttatagtccaggctgtcctcaaaaccacagggatccggtcgcctttgcccaccctccccaccccacagcgctcggattaaaggtgtgtgtcaccatgttcagcctaga

SEQ ID NO: 108 - DNA, 536 bp, Homo sapiens
  misc_feature (1)...(536): n = A,T,C or G
ggtctttcaagaggagncaatgctggcatccactgagtcctgagcctgacacgtaccaagagcggattaaaaggaagtcacaggaacaggaccaagctcacacgactgtccccaccatggaagggccatgaaccctgcctcgtgcagctgtgcatccagagtctggcaaagctgttgaacccacaaaaggcacagttgtctaaatgatggcaccagccacacatctgcctgcatctccactcagtccggccatggctcagcacaaggaactcacacccatttctacagctgagcctcagtggcaccaggatccaagtcagaagccagaaccaaatcaccgagttcttaagacacagaagcctgggaggggatgctgggaggtggttctggagccaagaacgtggcaaagaagcactacacagatgcgtccctcggtctcgcctgcctgctacccagacagcctgcagaagcctgggacttaggctgccaatggagaaagtgaagcgagcacagccagagagaacacaaataaaaga

SEQ ID NO: 109 - DNA, 104 bp, Homo sapiens
  misc_feature (1)...(104): n = A,T,C or G
cgaattttgggggctnaccngataaggctagnctgagagcnaggagtgacactntncaggggtgngcagggaagaaggaagcncaccgaggcggacgtcgccat

SEQ ID NO: 110 - DNA, 263 bp, Homo sapiens
gactgagatgggtgttctttgtgtatctctggctgtcctggactccatctatagaccagattgacttcaaactcagagatctgttggcctctgccttccaagggctgtgattataaaggcgtgggtcaccacgctcagaagataacaagtgttcaacaacaacaacaacaacaaccaaacttcctttgttgctctcccccttttagaatgggaatgtaatatggagctggtctcttggtcagaaaaataaatacacaaagcaa

SEQ ID NO: 111 - DNA, 387 bp, Homo sapiens
tgaggctttcttcaggaacacaggaccctcctgccctcaagtcccaccctctgccgaggactcaacttggctgttgagctagagaacctggaagctgaaaactcaagtgtgaggttctagaaggttatcagaaactctggaaatttctgcaagcctctggagctgcccaactccggatccagacgtcacaggctccagctctgtggtctccctcataccacaggccttttgtttctaagtgcttggctgcagcccaggaagcctggggcagggtcaaatgcacagcatcctacaggtcagctactcagccagctggcctggatgcgcagtgtcagcacccttgttgcctctaacactcccaataacatcttgtggcaaaaaaaaaaa

SEQ ID NO: 112 - DNA, 536 bp, Homo sapiens
  misc_feature (1)...(536): n = A,T,C or G
actgagtgaccaagatctgtgcccagtgtgagatggagcacagcgctgacggcctcatggaacagatgtgctccagtgactttgtggtcaagatgcgcattaaggagatcaagatagacaacggggaccgaaagttgattggagcccagaagaagaagaagctgctcaaggcaggccccttaaagcgcaaggacaccaagaagctggtcctgcatatgaagaacggggcaagctgcccttgcccacaattagacaacctgacgggcagcttcctggtcatgggccgcaaagtagagggacagctgctgctcacggccgtctaccgctgggacaagaagaataaggagatgaagtttgcggtcaaattcatgttctcctatccctgttccctctactacccttttttctatggggcagctgaaccccactgaagggccccctgctccttgccccaaccagccagctgtgccttgcctcgcctctgtnccccgcccacttggcctcacccttactcccaggctgacccatcccccccc

SEQ ID NO: 113 - DNA, 315 bp, Homo sapiens
  misc_feature (1)...(315): n = A,T,C or G
gttgtgcctgctgggcccttcaaggagagtggacagaactgaagtcacacctccactcagagctatgacggncctgactacagagcccagctttagcccggggtcctcagatggacaagagagagacacagcctgggtacctacatgctggcntactgactganacttgcacaagaggaagaagagnctgacagatagcnnaancgtggnggnaccagacaangngggacacacctatggaacnttcatgatggganatgtcagagatgtgagggntggggaaggacatcntagttcatagggtgatggaatgct

SEQ ID NO: 114 - DNA, 279 bp, Homo sapiens
agagctgcgacgttagaaaagggaatcggcggttaggagggcaccagtgttctgagcatgcgcaatctcacattctctcccatcaagaccacccggtaaggctatttattctctgtactacggacactgttgagttttgaagtcgcctcatatcaagcaactaagtgacgagggttagatctggaggctcgatactggctcgccttcagtttaaaccctgttacgcatgattgcttattcctttaataaagacaaatattcatttcgcaaaaaaaaaaa

SEQ ID NO: 115 - DNA, 116 bp, Homo sapiens
  misc_feature (1)...(116): n = A,T,C or G
ggaatccttcctggctgtactgaanaaccagaaagggncccagctnctacatttactctacggtgtcccctttgntggnnatncgnaatccnttgacnnacccagatacccaccat

SEQ ID NO: 116 - DNA, 535 bp, Homo sapiens
  misc_feature (1)...(535): n = A,T,C or G
tgagggaccctcaggagatcaagcggncagctacacacctctcctggcaccctgatggcaacaggaagctggcagtagcctatnnctgcttgaagttccagcgcgcacccatgagcatgaactacgactcctacatctgggacctggaaaaccccaaccgacctgagattgccctgaagccgttgtctcctctcgtcaccctggagtacaaccccaaggattcccacgtgctcctagggggctgctacaatgggcagatagcctgctgggatacccggaagggcagcctggtggcagagctgtccaccatcgagttcanccacctgagacccagtgtatggcaccatctggctgcagtcaaagacaggcactgagtgcttctcagcatccactgatgggcaggtcatgtggtgggacatccgcangatcagcgagcccatcgaagttgtcattatggacattntcaganaggancagcatggagaacgccctgngcgccatctncttggagctggagtctaccttgccaaccaag

SEQ ID NO: 117 - DNA, 367 bp, Homo sapiens
tgcctgattagtttgatcttcaggctcagcacaaagcttctccaccaacttgacgctcatcacaatagggttcaagcatgcacattgcctaaggctttggcagcagatgatccaaggcgtatatccccatgctgggccctcttggatgaaggcagtcttcagtgctcctgttaggcagtaagatccattacacctccagcaataatgccttcctcagtcctagcgggttgtgggtgaagctgaatcttgaacacacttgggtctcttcatgacttgacatcaggggaagagagctcatgagctactttcaacatttgtaactatttcataaaaagtaaaataaagccactttcttcagaaataaaaa

SEQ ID NO: 118 - DNA, 446 bp, Homo sapiens
  misc_feature (1)...(446): n = A,T,C or G
tggtccgtgttcgataatgacanggtccccgtggagcagctgcgtttctggaggcactggcattccctggcagcccaccgccaagcagcggcgtcatcgacgtaggtgagagagaaccccgngcctttnctacccnagancaaacccagntgggctcagggcagaagancattttctggtgatggaaacagcagccanntttcctgctgtgctctgagataggcggggccgtggagncctggcagtgccagcagaangggccccaggatgtaggcntgccatgggantcagcatggnaccgaactggnaggacagatgacagagtcagatgcaggaagccctgnnttgtgtccccagcccttcggnaaaagtgnnnnggtggcacanacttgcaantnctgcacgtgggaggtanaggttggggcattcgttaggtcatcttgagt

SEQ ID NO: 119 - DNA, 165 bp, Homo sapiens
attgaggacccacttggcgctcgttcagataagccacactggctttgttcctgcctgtgttcccaaaagaatgactccagctgtacatctgctttttaaggaccggttcagctgccaggagagagacacgatgggatcctgaggcaatgtggagtgattgaaaaa

SEQ ID NO: 120 - DNA, 387 bp, Homo sapiens
  misc_feature (1)...(387): n = A,T,C or G
ccatatcctggctataactccaactactggaattctgtgcgacccagggctccatacccaggctcctactctgtgaggccagagttacaaggccagagccngaantntnatgcnaaaggagcttatggnccgccttacnctccngggcctggagcaagnncgtgcntcctactctggggcttactatgtacctggctatacacagagcaatnactccanggaagttgcaaacacctaccgttcacctgntaacagcccaactccaatgtctcngnnnnatgcattcccagcannactgtccaacanaagcaccnccatctgagggnacaggngccaggatatccctgcttnacanaaccctgnattgancttgccccattattcctt

SEQ ID NO: 121 - DNA, 111 bp, Homo sapiens
  misc_feature (1)...(111): n = A,T,C or G
ggttacagtcctgaagtgaagatctatcaccaaggggtgtcagcctntaacngntttagaataaagactgagcgcaatctaggttgactaattaaaatcaatagtaagtac

SEQ ID NO: 122 - DNA, 150 bp, Homo sapiens
  misc_feature (1)...(150): n = A,T,C or G
ttgcggtgagatgaactgtgaacgtgagctanagtatggaagccannggnggaaccgtnaangcngcttcagnattcaactgcacccngaagatgcccagaccctgaggaaggccatgaaaggnntcggtactgatgaagatgccattat

SEQ ID NO: 123 - DNA, 312 bp, Homo sapiens
  misc_feature (1)...(312): n = A,T,C or G
cttccgccttccctggcngagctgggctgggagcggacccctcgccccccagaccaactgactcccggccgcttacacccactaaagccctagcttccgcctgccctgactccctcagcccctcatagnaaacaaacatggctccgtctccaaaattaatgcctttcaaaggtgaaaggtcaactccagataccccactggcctccagcacttaaggccttttgaggctaccctgtncccccagttnctggcttccaatcacctgncacatttctcaggcgcataagtcagtngtnccctgccctttaaaaa

SEQ ID NO: 124 - DNA, 512 bp, Homo sapiens
  misc_feature (1)...(512): n = A,T,C or G
actgagacagaatcaaggagggacacagngtgtacgcacacattgccaaactgcaggagttatggaaaactactcaaatccaaacaattcatatccctaaatcaatgacagatgcatcttttctaaagcatccagagctcaccttgggccagaagcgttacctgtgcagcgttgctaagatctgtaactccagctacctgaggaccttgatgaagaggcagtacatgcacatatttcatcacgggtcacagaagacaggtgtgctcactcaccacagaggccatatgagctctcgctactcacagaaacagcattccccctgtactgcatggagacaccatctggagagagaggactctctgagcattgcagctggagcacctgaaatgatcatacattccctttggcgacccctgagacacaaagaagggttaaaaattgggtatgcatctaaaacaagatgcaagtccctgaagatttttagaagaccaggcagactgttcttgttacct

SEQ ID NO: 125 - DNA, 119 bp, Homo sapiens
  misc_feature (1)...(119): n = A,T,C or G
atcctgaatggctacatgcagaagtnccgnactttcctgngctccatctcacancagancatccgcgtctcagnagagacctctggatccaggagctggggaccctggatgccagtgac

SEQ ID NO: 126 - DNA, 110 bp, Homo sapiens
caaccagacaagccacataaaagcaccctaaaaattaaactgtcatcatattatttgttttaaaactatggaataatatatctgaggaagattactctcaaaaaaaaaaa

SEQ ID NO: 127 - DNA, 182 bp, Homo sapiens
  misc_feature (1)...(182): n = A,T,C or G
attgcatgttctgaaatggtgaccaattactttatgtgctggaatgcagttgagagcatcagaggagtgtggtttgtattntgatcatccgtanatgtatcctactctcttatatgtgccgggatttaaagaaataaattgccatggaaatgttgaagtcaacagggcacttgcataagatg

SEQ ID NO: 128 - DNA, 509 bp, Homo sapiens
  misc_feature (1)...(509): n = A,T,C or G
ggcaggagctcctggnntggcagccgctgtagaagctatgacagaatacaagcttgtggtggtgggcgctggaggcgtgggaaagagtgccctgaccatccagctgatccagaaccactttgtggacgagtatgatcccactatagaggactcctaccggaaacaggtggtcattgatggggagacatgtctactggacatcttagacacagcaggtcaagaagagtatagtgccatgcgggaccagtacatgcgcacaggggagggcttcctctgtgtatttgccatcaacaacaccaagtccttcgaggacatccatcagtacagggagcagatcaagcgggtgaaagattcagatgatgtgccaatggtgctggtgggcaacaagtgtgacctggctgctcgcactgttgagtctcggcaggcccaggaccttgctcgcagctatggcatcccctacattgaaacatcagccaagacccggcagggcgtggaggatgccttcgggc

SEQ ID NO: 129 - DNA, 156 bp, Homo sapiens
  misc_feature (1)...(156): n = A,T,C or G
agagagactgaatggaactccagcatccatctntttctgcttcctggcttgcggccactagntcatgttctgccaccatgcctttccagcagcacaaactgcatcctctcaaactgggagctgaaataaaccttgcttncttcccttaaaaaaaaa

SEQ ID NO: 130 - DNA, 162 bp, Homo sapiens
  misc_feature (1)...(162): n = A,T,C or G
ggaagaacagaagcgcccttacagtttgagacttncacttagagaccgacananggagntnntggcctgcaggatcanagggacagcattgcctatgagaggtagatggccagttcccttctcggcagttctaaaggacagaganactggatctgaaaaata

SEQ ID NO: 131 - DNA, 103 bp, Homo sapiens
  misc_feature (1)...(103): n = A,T,C or G
ggactctgggaggagatgcctggagcagaaaccaccgatcagaatttacgtgtataattnttcaacctaataaacatgagttgtactcttgtagagaaaaaaa

SEQ ID NO: 132 - DNA, 421 bp, Homo sapiens
  misc_feature (1)...(421): n = A,T,C or G
ctgagttacacagagaagatganatacattgccaagaaatgtggagttaggttccagcctccagctgtgatcttgatttatgagaatgaaaccgaaggaaagagccgccagcgtatcatgcctgtccgaaacttttcaaagttctcagattgcaccagagctgcggaacagttaaagaataacccacggcacaagagttacctggaacaggtgcccctgaagcagctggagaagctgtttgtttttttgcgaggttccttgcaggggcagagcttggcagaaacaatggaacagattcggcgggaaacgaccatcgatcccgaggaagacctgaacaaactggacgacaaggagctcgccaaaaggaagagcatcatggatgagcttttcgagaaaaatcagaagagaaaggacgaccccc

SEQ ID NO: 133 - DNA, 178 bp, Homo sapiens
  misc_feature (1)...(178): n = A,T,C or G
tgaggtgcggaggtctagggacgtgagagtcnacttgcngcgacttgccctcactggtgatgactgctgtnngattccctngaanctncntgctgnangatgatttctgcaacttgncctctgaaacacacncacgtaancnaataangaagttaataatacttttacagatcaaggg

SEQ ID NO: 134 - DNA, 194 bp, Homo sapiens
  misc_feature (1)...(194): n = A,T,C or G
atgctcgcagctagcccgatgtntnctaccacttcaagtagtggaagaaatgcagggannactataagctttgcaggccgagttgcagagtatgatgtgagtacgtctttacacaatatgacctgttgctattttaaactgattaatcggtgaanaagaaaattgaaataaaatgtataaaccttaaaaaaaaa

SEQ ID NO: 135 - DNA, 158 bp, Homo sapiens
  misc_feature (1)...(158): n = A,T,C or G
ggggagatttactgcaggctggctccatccgacaccctcncaggtggtcactgcancctgtcacttccttctccctgctggccacctttggattncncggngagcncggtcacctntgtgcttgntacctgnatcctccagcaaggctccgcccacca

SEQ ID NO: 136 - DNA, 140 bp, Homo sapiens
gactgagctgctgttcacagactacaaagctcatcagttctgagccttacagtcttcatggcaccaagtgtacagaagacagaagtcacctgtccagaaacatgaaataaaagttgagacaaaccctgtaaaaaaaaaaa

SEQ ID NO: 137 - DNA, 178 bp, Homo sapiens
  misc_feature (1)...(178): n = A,T,C or G
cctacacttccagtagctgcccggcccagcaggccccattcagcagggtgctgttcaagaggctacagaggcactggcagcaggtacagacacagctggaggatacaccggngctgggactctgagcaaaggcagcaagaagaacacaggaggcagngntgaggagacttcacagtcc

SEQ ID NO: 138 - DNA, 302 bp, Homo sapiens
  misc_feature (1)...(302): n = A,T,C or G
gaaagagggacatttgaaccattaccttttttgaagtatatgaaccttgnntgcanttnactcacggaactgagctttggaacatttnaagcatggtatgggatgcagtttttacagcagntaattctcagccgcanacctctcctagttgntgaagatncctactttnttaanatgccancgntaananatctggacctgnngaccacacangtgcaactgacnacgnnngagagcatncncataatgactntgnanctggaacatcctgatcntacctagnccccatggcctgctggcct

SEQ ID NO: 139 - DNA, 181 bp, Homo sapiens
gttaccgtgttaagaccattgacatttgaagcatcatcagaagtgaagataaaacatctcaaaaattataatgtaagtgaatgggaaactgcaaaaaaaatggatagaaattaacattgccagtaatatccttgggatcagatattatcccaaataaactttgtgcacaagtaaaaaaaaa

SEQ ID NO: 140 - DNA, 283 bp, Homo sapiens
  misc_feature (1)...(283): n = A,T,C or G
ttttgagagactgagtcctctgttgagcactcctgncccagtgctgagacccatcactctgtgcacccctagcaacctgacaaccctccagtctgatggtcacaggcagtagctgtgacaccacagaatggtcctctctggggcgaccggttgattgttcagtaccacctactaaacgtgtagtcatcctacttgacatgatggctttccaaacntgttcccaagtgctgaaaatagaactttataatacttaaataaaataaattattgagcaaaaaaaaaa

SEQ ID NO: 141 - DNA, 155 bp, Homo sapiens
  misc_feature (1)...(155): n = A,T,C or G
caggcaccccgccggncnggcattgtactgtggccaaanaaaccaagctncgtggccaantacgtngaggtggacanacctaagaacgacggccnaccatcacgaggnggacancaagccgganaagggtcctcgcanagtcaaccgggaggtgg

SEQ ID NO: 142 - DNA, 230 bp, Homo sapiens
  misc_feature (1)...(230): n = A,T,C or G
tccctagggccctagcngttgtgggcctggnacctgttgatgcacacggagcgttccngnattaaaacatctcactggcctagataatgagctntcngtaaaccgnncncnancctnnggcctagcanttgtcgncaagcactgttctgcacactgatcgtccgcacattaaagagctcctggctagcaagagctttcaataaacctgtgtgaacctccaaaaaaaaaaa

SEQ ID NO: 143 - DNA, 251 bp, Homo sapiens
  misc_feature (1)...(251): n = A,T,C or G
cttagcaaaagcccttgtcagtttacaagatggctngcaactnactgtgtngaccnnactggcctagaactcagagaganccacctgcctctgcgttcctgttgaaagncactgtgcctcatttaaagactaccttaaccagaacatggagtggagcttcagngtgtggagtgcttgcttccgctctcagctcagnattgttgctgnaaaaacactgaacagncaanaancctatgctgagcttacatcag

SEQ ID NO: 144 - DNA, 402 bp, Homo sapiens
  misc_feature (1)...(402): n = A,T,C or G
cctcctcaccaacgcatctaaccttnangnnccangangngnaggagtnttaggatccntgnnanncngtaacagtgccttgntgtgacagcggctacacctnagacacacaggcacacatttgcccangctgaananatgggagtgcagntncttggtgaagcagatgtctgcagctgctggggtcctagagcagcaatagacccaatcatccctgcctccaagacttcccattgcttgtccccaactctccccacccaatataatgcctgccatcactgccatacagaatgaagctccaagagaaggccctaaggagccccacccatgcccttcctggaaggctggatgccaactcctgagcagagaaaggcaaatctgggcagaaccgtctacaattgg

SEQ ID NO: 145 - DNA, 203 bp, Homo sapiens
  misc_feature (1)...(203): n = A,T,C or G
accgaccaccgtgaggaagtgggggaataaatgccttaaaactatggactganccctgtggggtgccatggagaataccttgacctatagagnggctagttaatctnccgttgaaggcctttctgnactccnaaccacagnagccaccaaagccangctcaagaccaccgccaccgncangccaaanaactcccctcaaacct

SEQ ID NO: 146 - DNA, 349 bp, Homo sapiens
  misc_feature (1)...(349): n = A,T,C or G
ttatgtggtacgagcagncagattcgnggtctgctaccatnnacannancaccggctgcggggccancggntgagaactnccaacaacgnccgtgtntgaggagcacccatatgccttcttcctccgtcacacacaggataccagtctactcccacagagaggagcatgggtacacngggaagctataactacgggagctatggcaaccagcatcctcacccactgcanaaccagtatncagccttgnctnatgacacagccatctctgggcctatccactattccccttaccanaggagctctgcccagtaccctttcaatagccccanttncaggatggaactcttg

SEQ ID NO: 147 - DNA, 151 bp, Homo sapiens
  misc_feature (1)...(151): n = A,T,C or G
cttgcaggtccaacacnggacatgatagagaaccncncnnaagagccgggaaggnagccccanagaaaggttggccattttttnagaaaganngttgaaacctnngaanaanatgcccaaggtcctgaacatacnggaaaaaaaagaaggg

SEQ ID NO: 148 - DNA, 154 bp, Homo sapiens
  misc_feature (1)...(154): n = A,T,C or G
gctttgaccgcctaagaatggctncggaacctagaccnattccaaccccacctttctgaccaactcccagaggataccagggcttttcaaagagtcactcttccggtgccaggtgacagcatgtgaaacacccctgcccccaataaaaacaaaa

SEQ ID NO: 149 - DNA, 196 bp, Homo sapiens
cctgtgtgtgtcaatgatgtgaaagcagaaacggagctgtctggaagaagaaacagacgagtatacacaagggaggagagaggagagccattagaaggaatgcaaggtagacatgctcaaagtatgttatatacaggtatggaaatggtcttattttacccagttaaataaagcaaacagttttcaaaaaaaaaaa

SEQ ID NO: 150 - DNA, 243 bp, Homo sapiens
  misc_feature (1)...(243): n = A,T,C or G
ataagtcacaatgctgtccagngcctgcacatcaccnnncgcctcagnngtggacaccctganatctntgntgggagccattgcaccctgagacnctngntatggcctcncattgtgtgcntataatctngnancnanggnnttatgtaccancnccatccttgccaaccttatgcaacccttagttcacccggggatacaaggatcaccccaaaataaatatgtacaagctaaaaaaaaaaa

SEQ ID NO: 151 - DNA, 229 bp, Homo sapiens
  misc_feature (1)...(229): n = A,T,C or G
atacggcaaggcttttgcagaggaagaaactgcagtttaaagagtggctggcctgtagtcatcaagcctgcagacaggagaggcaacacccanactcagtgactgcctcagtgtgctccatgtgnacagaaagacggngattggaacagtttctcancccatctgtcgagcgacagattgaggaaagaggtaaggaagtaaggctgggcttnatcagtgcattctgtga

SEQ ID NO: 152 - DNA, 406 bp, Homo sapiens
  misc_feature (1)...(406): n = A,T,C or G
atggcagggacagcgcgccatgaccgggagatggcaatccaatccaagaaaaagctctccacagctactgatcctattgaaagacttcggttgcagtgcctggccagaggttctgcaggcatcaaaggacttggcagagtgtttcgaattatggatgacaataacaaccgaacccttgatttcaaagaatttttgaaaggctnaaatgattaccgctgtggtcatggaaaaagaggaggcagaagancttttccagagattngatagagacggcagtggaacaatagacttcnatgagtttcttctcacgttaaggcctncaatgtccagagccannaaagangtantcatgaaagcttttacaangttnnacaaanactggngatgggggttataaccattcgca

SEQ ID NO: 153 - DNA, 149 bp, Homo sapiens
actgaggtggggtctttcaagaggagcgaggagaggccgcgaccgggcagagaccgccggagtcgccgccggagaggagtcgactcgccagccgccgccagcgaggcccgcccacccgtttgtctggccctctgccccgttcaccatgc

SEQ ID NO: 154 - DNA, 546 bp, Homo sapiens
  misc_feature (1)...(546): n = A,T,C or G
gactgagggatgaagcaggctctctggcttactaagaccaagttaatagaaggcctccccaagaaagtgcttagtcttgttgatgatccagctaatcacatagagaaccaagaacagcgtgttttggatatcatctcccatgcccggctttggcactccactgaggacatccccaagagagagacttactgcccactcattgtggacagcctcatacagctgtgtaaatcccagattctcaagcacccttctctagccaggcggacctctgcccaaaactgcaccttagccaccacctggaaccgcgagtctcttctccttcaggtccgaggtactagtagtaccatactgagtgccaaggatcccctgcccgtcattgcctccagggaggaggttgaagctaccagaagtcatgttcttgaaccttctatcccatatnctcctaccatcgatcttcaagaatgccacggtttatgaaggtgaaaggatgacacaggggtttcaggagggctaatccttaccccccattcccccacacctttgtaa

SEQ ID NO: 155 - DNA, 203 bp, Homo sapiens
  misc_feature (1)...(203): n = A,T,C or G
aacacggaccgagacagntgccagangaggccctnccctccctgngctcggtgngacagggcattgaggagcattagancgtgagcgctggaagccannctgntaccntncaagaantgcacgannagcgtgtantcacatacccagccttcttgncagacgntggaggctgtgttntgctattanaaagggaacacactggt

SEQ ID NO: 156 - DNA, 274 bp, Homo sapiens
  misc_feature (1)...(274): n = A,T,C or G
tgggaggtaagctgacnngctcatgtanccaggaaggaagcacactgcagaacatttggcaggtgtgtatctctatgacatgncactgctccctcatgaacctgnnagcttngnantaaacctgatcagnnnnaactgcttgggctgccccatcnttggaangannctttngaggcanatgtgaacttattnnacatggttcttgcanaccttgaanccnaatgganggctggagctnttgttggngagaggccctaactgctcaccctgtgtg

SEQ ID NO: 157 - DNA, 527 bp, Homo sapiens
  misc_feature (1)...(527): n = A,T,C or G
ggagaagatggccttctgggacagctggggcttccacatgcagattcccatctcctagtattgtctgctgagagcaaccaaaacccatggagaagtggtcctgctgcaggtctggggcacatcccatacctgtgaggatgctggctgtctaccccagtgatggaggagggcgttgaggccgggcttgaagagcctctcaccactcttggccacttttatcaaggatgcaaactgcattgggttgaaaacaaaccactgatgttttaggtcactcgactcaccataacaccagggcattcgtgacaatcataactcatctggaggctttgatggtgcagagaaaccagctagcaaaactaagggaaaacaccaagcatggacgtctacatcagtcatagactctagacctctgaaagcaaagggctgcttgagggaaaggccccgctnctagccctaaaagaaatcntgaaacacntnangggacancccacataacacacaggttncccaacccaaacccttaccag

SEQ ID NO: 158 - DNA, 114 bp, Homo sapiens
  misc_feature (1)...(114): n = A,T,C or G
tgagccggcgtgccagtgagggccgaggaggggagccncatttgncacaggncgacttcngacagcggnaggcctnaaagccacngtgacagcncactgactgcattcttattg

SEQ ID NO: 159 - DNA, 104 bp, Homo sapiens
  misc_feature (1)...(104): n = A,T,C or G
ctgaaaccttcagtatnatgcaaactttgtctcttcactggaccctgggagaaggacaccaccaagactgaggngtgtgnctggtanatacaccacagatgctg

SEQ ID NO: 160 - DNA, 475 bp, Homo sapiens
  misc_feature (1)...(475): n = A,T,C or G
gactgaggcagctgagagtcagctgagtcttgtgattattgcccggatgctgggccagcaggagtcacttcctttctcggcagagaaaacccagctagccctgctcagccagctcctcagcctcatgaggccttcgtccctcaggcagtgtctgggcattgaaaccttgccatccagtctagggcaacacgtcaaaggccagtgccgagctagactacaagggctgntatctgngccacagcntncngacactagntganatcagcggtcagtanccaggacantactcnnnatcantgggggnancnacagatgtagcgaatgcagcnggacnagggatatcagctngcnatatgcgggganngcncncaagnccanggaccgggaactaannncncnngcntagnnacccagannnnacatcccgcntggngggacctnggntgncnccaangtgcagccccaaagaataggt

SEQ ID NO: 161 - DNA, 209 bp, Homo sapiens
  misc_feature (1)...(209): n = A,T,C or G
ctgagatgaagaacancgaggaaagcatgcagttcataacacatctgggccatgacttccatgatgtccacctctcttgggttggacctgtgtacccaatcctgcgacgtcgaccacccnaacttcattgctnccctgctncaagcctcagnntgctgtngcacccaaggaaactgactctcgtatggcttcctgaagccctggctggg

SEQ ID NO: 162 - DNA, 289 bp, Homo sapiens
  misc_feature (1)...(289): n = A,T,C or G
atgggactactccagtgtcactgnaatctggaccaattcccttttgcgccctatgctggcctgggagcagntnaacactacctgagcggntattcaaganctccaagtgntncagaacttgacctggcngagacttaagagtgcccagccagagaaccagaccaggctccagcttgcataggacagtcacactcagtatgtgtctgtctaccttccagctggaagccacaatattatcatgtgcaaagtaatttgcccaaagtaattaaacaattttgtttctatatta

SEQ ID NO: 163 - DNA, 147 bp, Homo sapiens
  misc_feature (1)...(147): n = A,T,C or G
tgactctgactcctaccttctgagattaaaaactgcgaaaccatgctgngccctgnccactnntncttcngnctcccacccctgcttataatncgcatntgcagacgagaacggggcatcanaacgcngcgatgcttgagctccact

SEQ ID NO: 164 - DNA, 161 bp, Homo sapiens
  misc_feature (1)...(161): n = A,T,C or G
tctggccgcgcaggtgagcggggctgatagacnangaacgangcagtgcnngaangngattagggtggaccagctccnaggantggaagaaagcaggagtggagaagggacgaggtcagtgcangccgncannactggggngcaaatgcttggccaatttg

SEQ ID NO: 165 - DNA, 327 bp, Homo sapiens
gactgagtgtctcgttcgatccagttttctggtggtctccagcgaagacaggcgacaaagccgttgttgagtgggatgggccggcgaccgcccggtgtgagtaatcccagaacccctcctattcttgcagttcccaaagggacttgggaagttggagagctgactcctgattaatgtaggaaagtgttcgtttcctatcttccactcttggttccttctgtgctttttggggatccactcacagcacctccagacttgtggcacattcaaatccaagtctttcttgaagagagccaaagacttattaaattaaacttgttactggac

SEQ ID NO: 166 - DNA, 116 bp, Homo sapiens
  misc_feature (1)...(116): n = A,T,C or G
ggcgtcacatccatctgtanngagatatgatgcctttctctggagtgtnctgangacagctacagtgnanattacatataataaataaatattttttaaaaatggaaaaaaaaaaa

SEQ ID NO: 167 - DNA, 267 bp, Homo sapiens
  misc_feature (1)...(267): n = A,T,C or G
atggagaagaagattggttccaggtcttttagggatggtgnggttaagaaaccttgttctccaaaggccctgcccctcaaaaagtcttctgccttctctgggatccagagggagccatctagaagctgccactctatatactatcatgcctcacaaaactggactcgataccgattacaagaacttcgaatcaggtgtgtggccagaaagttcctgtatttgtggattcgagtgacttttggaagagtgattccctctagagccagg

SEQ ID NO: 168 - DNA, 228 bp, Homo sapiens
  misc_feature (1)...(228): n = A,T,C or G
gcatcccagaccggcatgcagcaccnctgtnanaaagncacaaaagacantgactngtagtnncaaaggggttgggagaggaaaacctgtacagagggcgtgaatcnttntcttncacccanggaagcgtntntacangacttancattttgggtntccacatgggggacngccacntgatggggacgtnaggtntacagtgnaaaccgggataataaatcctgcgcg

SEQ ID NO: 169 - DNA, 113 bp, Homo sapiens
  misc_feature (1)...(113): n = A,T,C or G
gactgagggcttgctcaagaatgggccccnctctgtaaccgtgtttgggcttcctgaataaaatccctacactctntttgttcatggagggcatccctttggaaaaaaaaaaa

SEQ ID NO: 170 - DNA, 340 bp, Homo sapiens
  misc_feature (1)...(340): n = A,T,C or G
gattgagctgactctctgcctccacngnctcagcagnacggaatcctcagcagcaccatccaaccagcaaggtggtggtgaganggcagagagaagcagaaggctcccatgaaaacaaaccatagaacacaggtgacctcnnatgcgattctgaggagcactgttgccacgtgactanaggagagaagggagggagggcctccgggagacacangacagaggcaaaggttcangtctntgatgnngcctcccttgttctgaccctacanacatgnggnngagaccttattttggaaaagggactctgaanacatgattaaatatttcaggctgagaaaaa

SEQ ID NO: 171 - DNA, 166 bp, Homo sapiens
  misc_feature (1)...(166): n = A,T,C or G
gacacatgatcccacatgnttccacatgnacttgcatactaaagtggcctnaatgcacagnaggtgcaacantncttggcccatgtgtacgcnaggantggnagttnaaagagtgaagnccgtncngtccatttccntctanngtgctgtgccaggctcagaccat

SEQ ID NO: 172 - DNA, 107 bp, Homo sapiens
  misc_feature (1)...(107): n = A,T,C or G
tatgaatgtctggcttctgggtcaggcgntaagcngctgggcagcggactttaanaacntcattgacggaaactnttcnaaaggtntggcacaggtaaaacacaaaa

SEQ ID NO: 173 - DNA, 186 bp, Homo sapiens
  misc_feature (1)...(186): n = A,T,C or G
gcttgctgccacacgtgngaggactgctcttttgtagcatgccagtggtgctctctgccttcattgccaccagcaagggagcccccacaagacatgcaggaagagagtgaagctaatcagagaaattgacagctgtcaaatgtcccactgaagtcaaacatgcgttgtgatttccaaaaaaaaaaa

SEQ ID NO: 174 - DNA, 103 bp, Homo sapiens
  misc_feature (1)...(103): n = A,T,C or G
cattttggggggggcggcggtggcagagncccctacancccagctgnaagataangnccttcanaccttccatggaggngttnagggagcacaacaaatacct

SEQ ID NO: 175 - DNA, 280 bp, Homo sapiens
  misc_feature (1)...(280): n = A,T,C or G
cgaaagacccagcgtgaccttctacagagatgtcaccatccagccacctnggccaccactgcctactgngaacagagagctctacatcccaggacccttggngatatttctcatcctattgacatccctgggaggtgcctttgtgtgtcgagtcctggtctacagcctgttccaatcctgctccagaggaaaaacttgtcataagtgtccatggnagaccaactaggcaaggagatgatggagagagacnaaggagaatgagtntactgtggggaccggc

SEQ ID NO: 176 - DNA, 301 bp, Homo sapiens
  misc_feature (1)...(301): n = A,T,C or G
agttaatcggtttccttggatgaaaaggcttgcaggctgagcacattggtaagactcgtggctccaatttgatgtaagccttgnatttaaggngaatcatctctctgtgactcccccggatgtctccagctgcctgcccccttgctttctctgtgcgaggagcaagaagaccattaagaactctggactcagcactggggacccctcttnaccctgaagtgaccttgcccaggnaattgtggaatattaggnggnactgaaggcactgtgcctntnngcttccctgtgcgattaccttggg

SEQ ID NO: 177 - DNA, 207 bp, Homo sapiens
  misc_feature (1)...(207): n = A,T,C or G
aagctctgaggctctnctgggcctgctgntgaattnctaaggagtttgccttggaagaatcanacagnaggatggacttgggaggacacctagtggtnnnannagtggnttacntgganctctcanngtacnaccaggctggaactgnaactaacagagatcacctgcctatgactggnnggatactgggattaaaggtattcaaca

SEQ ID NO: 178 - DNA, 378 bp, Homo sapiens
  misc_feature (1)...(378): n = A,T,C or G
gcctctgtctcctgtgngcnggttttagaaggtgtgtgccaccatacctggttactatngacacctacacagngacacacacacacattcacacctcactcacacactcacaaacgcacactcataacacagccatgcacactcaanacactgntacattcacattcacaaacacacacccaacacacacagacacacactcacaaacactngtntntgtcacacacacgngctncagnagaatctaanacgctgtcctcacccanngggcctgnagaagatnaatgcncaaaggatcggacacccctgccnttatcangcacntncttagaagctgnanaccacanntttacggaagagaacgagacctgagaagcg

SEQ ID NO: 179 - DNA, 206 bp, Homo sapiens
  misc_feature (1)...(206): n = A,T,C or G
tcgcattatgtgcacattggccntcctacatgcaaacncncncacgaacagctctcctgaaaacacggatccccatgagcgctaaagnggnactgggaaatgcttggtcttcnttanttaanaacaagaagatggngatgaataccaggtcattgagtgcgtctaggcttgcatcatgtgcacacgngaccctcctacatgcaaac

SEQ ID NO: 180 - DNA, 152 bp, Homo sapiens
  misc_feature (1)...(152): n = A,T,C or G
ggcatccctctccgcctgcggactcaggcagctgctggtgtgctttcctctangcccccatcagagctgggtatgctcagcgggttntgagtgangcttntctcagaggctgnattgctcncgtggggcccggnagcagacaaaatgtgcct

SEQ ID NO: 181 - DNA, 132 bp, Homo sapiens
ctgcctactgcccacatcaggataccagggtgggtcgttcctgctgcctccctgcttggaacactctggtttgcatacttgtatgaagtaagacacaggagtaaagtcacctctgcagcatgaaaaaaaaaa

SEQ ID NO: 182 - DNA, 176 bp, Homo sapiens
  misc_feature (1)...(176): n = A,T,C or G
cagatgcaggcgtggctgctnggcaggccggaccntatatcncacnagagcaganggcnctcancacgctgtnngncatgtttggannacttccnttttgncataaccctgcttcatggaccatctacgtgaaaagaanggccgtcaaaaatgtcttacctgcaccaaaaaaaaaa

SEQ ID NO: 183 - DNA, 320 bp, Homo sapiens
gactgaggtggtgagattcctgaggaaatgccagtttcttggatacattgtctcaaaagacaacaggaaggccacgagaatctcttcaaaatgtagctcctcctgccaatctcttcacatttctaaatcaaataacacccttatcagtgcagccaccatggcatccccgcatcagtgtagccatcagtgtagccacccgtggcatcccagagtccctcctctcctctctgtgatcttatggacactccaggatttggtttcagtccatggggctaccattctcccattccttatttgaagctataaggtagaacctaaaa

SEQ ID NO: 184 - DNA, 379 bp, Homo sapiens
  misc_feature (1)...(379): n = A,T,C or G
cagggacagaaggacncgtgacattgangacatgtgccctggaaaaggctgagattgaagaaacttnanaactcaggcnaaggaaagagaacaccatcttcctgactacaggatccacagtcagtgaaatcctgccttcgttctgaagacacacccaagagcggagctgcaggacaatctggagattccattntaatgtcttgaggagccatcacactgctttccagagacgttatagnccctngagtatgtncctgactgacaaaattnccagagncanaagtttctccatttcccgnnctctaacccttctcttctgcacctatctatgccttgtcacaaagcacacagtaaacaaatccctggaaaactaaaaaaa

SEQ ID NO: 185 - DNA, 216 bp, Homo sapiens
  misc_feature (1)...(216): n = A,T,C or G
taggacttgtcaagtcacgaatcctacatgctttatttctgtttcaagaacctagatgcctaattatcacacaangaggtataatgaatacaacaccacntggagaagcctgagaacttagcagatatattaaaaataacctcagtttttacagttttctctgattcaatgtagaaaagaattcaaaacctataaacactataaattttcattctg

SEQ ID NO: 186 - DNA, 238 bp, Homo sapiens
  misc_feature (1)...(238): n = A,T,C or G
actgagagtctcctaagaaatcgggctacagagcaacccgctacaggactcaggaggctatgaaataacacaaggatcttcaagagggaagatcgccacccccacccagggaaaaaagatggaagcttctacccattctctctcccacttctgaggatccccacagctaacatgcaatgcctgctccctaccacnngaccaaaaattgacttaaagcacacgtgccctaggaaaaaaa

SEQ ID NO: 187 - DNA, 277 bp, Homo sapiens
  misc_feature (1)...(277): n = A,T,C or G
tgcagtagctttggaggatggatgctctgtctgactttcttatgatgctcctggaagatgagaccctctaggaagaagcctctgcttcccactgctggattgngatggatctnattcgcgcttgtctcactcctggaacaaaacctctgaccggagcaacttaaggaagggaatgtgaaaagctatnctgacaggggaggttctnttnttatggccttccngnattanatgaaacctactggntnaattaaagattnatcccttggatgaaaacaac

SEQ ID NO: 188 - DNA, 150 bp, Homo sapiens
  misc_feature (1)...(150): n = A,T,C or G
aaccgcacagtttggnatgtcacactcaggatgcagtttatgggagcccctcccacaagatacttggagtgctaggatgttcccaagcttttgttcagccttactggagtttccaggccattgaaaactagtgatcccgaaaaaaaaaaa

SEQ ID NO: 189 - DNA, 281 bp, Homo sapiens
  misc_feature (1)...(281): n = A,T,C or G
cagcagggagctccatgacacgtttctcagctngngaagaaggcccctcctagangctgtnaatggnaatctatggagaagangtgtgagatacttcagggttataggactttctgactngnttctttcnactggnaatccnantatatncgacctgtagtaacaagtaaagctntaagacncacgacacannttgnaaaaatgaanaggntntgccnttattcccgaccntcncananntgaaggnttgcagccaaccacaggattgagcacaccaaccc

SEQ ID NO: 190 - DNA, 425 bp, Homo sapiens
  misc_feature (1)...(425): n = A,T,C or G
actgaggtatggcattcagcaaagccttcaggccatgaagggaggcatggacagcagaccagactgccgatgatggatgggacagacagatggacagacgggcagacagatacacacacacactcccccctccaggcagtacactggtggcccctcaaggtgtacngagatcaggatccacatcctccctcccataccacacccttccactccagtctggcaaatagtggcattctcctgccccagtgggaaattcagactgcagattccctgtccaggactttgtgctactagngtattggtgctgaccaacactgctggtaaagagagacacaacccaggacccacaaggagccaactcctacaagttgtcctctgacatcatatgctcacacacagaaaataaatgttatagactatctaaa

SEQ ID NO: 191 - DNA, 166 bp, Homo sapiens
  misc_feature (1)...(166): n = A,T,C or G
aaggagaccgcctaaagcgggatcccagggctggaggccttggcgctggccactcgaaaaggcggtttatctgggacggagggaaggnggaggtggacgcgcgtttcttctccgagngngnnnnnctcctcttgcaataaagccagtgacagcatcaaaaaaaaaa

SEQ ID NO: 192 - DNA, 123 bp, Homo sapiens
  misc_feature (1)...(123): n = A,T,C or G
tcatggagcccacggagggaagagactatttcacagtctttcaaacttcacangcatngnaananngtgccatctgccacacccttccncattcctctctggcctcaaaagatttttcatgtg

SEQ ID NO: 193 - DNA, 196 bp, Homo sapiens
caaaaatgttgccaccctttggtttggtgaaatagctcactgaggaaaggaacttccggtcaagtcagagaacctgacttcgatcccaagaccaacgtgatgggagtgagccaattctctgaggttctcctttgacacataatcatgggcgtgtggcacatgcatccacatacacactaaaataaaatttacgtgc

SEQ ID NO: 194 - DNA, 205 bp, Homo sapiens
  misc_feature (1)...(205): n = A,T,C or G
cttgagattcgaatctttggaacaaaagcttcattttcattttgccctggtccctgcagaagatgaaaccagtcttgaatgtggntcaccgcactaaatgccaagcatttgatcaatctgtacttgcgactgatttgaatttggggaacaggccgttccccgggaataaagaaggattcatttcttttccctcgaaaaaaaaaaa

SEQ ID NO: 195 - DNA, 131 bp, Homo sapiens
  misc_feature (1)...(131): n = A,T,C or G
actgagtttggatcacaagccaagnacagtggtcaccagctggtcatcagaagtctcgcttggttcccacagcagccctcggttggccaagggagatgacccangacccaagcagtggacacatcaccagg

SEQ ID NO: 196 - DNA, 105 bp, Homo sapiens
  misc_feature (1)...(105): n = A,T,C or G
tactatcagtccttganggtcaatntgtgattaaagctctantaatgtnngttttacaaaagtgctnctgtgtnngngcattgangataaggaattaaaacttcg

SEQ ID NO: 197 - DNA, 286 bp, Homo sapiens
  misc_feature (1)...(286): n = A,T,C or G
gtagggacactggtccacantgatatanccatctncctgcgcgnggaatatttangtcatctntactgcnacctntntattgattgagaatgngctacaggcntgngggttccagtgtctgtataaatgtctgcttttancagntaaaggcatncnaatgcangtggcggcaagtgtgcccgctctacagggggtcgtttcttaaagggcctgcacagcaaacgaaaggggttatntgaatttttctcccttctgcaactagaagcaagtttttcttgggaagtga

SEQ ID NO: 198 - DNA, 288 bp, Homo sapiens
  misc_feature (1)...(288): n = A,T,C or G
tgagacgggtgttctggaaaggcccagggccttgctgtggttcttctgaaagaccatggagaagctaaggacagactaacacacactcttctctccgggaggaagcatagagcagaaacaggtcattctgctgcaaaaacctgtanagagaatgcngcagctgtcaactgggaggtgtgccaagacacaggccctggggcctgcacaatccacctgggggctggagactggggaactggtttctgctctaatggcctcatttagtaaacctcttccttatgtcaaaaa

SEQ ID NO: 199 - DNA, 207 bp, Homo sapiens
tgcatggaacaaagaatacaaaaaatgtatccacgaagagaccattctgtgctgcccaaaagtctctcagttgggaactccagcaagaccatctcctcaggcttccatggccacacctctgggtgctgtctctcctctgcttgctgtttcttctttgaccttcacttgctgtgtgtattataaacttactcattcaaaaagaaaaaa

SEQ ID NO: 200 - DNA, 145 bp, Homo sapiens
  misc_feature (1)...(145): n = A,T,C or G
ttttttttttgtcttcacngcngcacgngtacaaagggggaactggacagacanncagangtccctnnncagatgctagacagnaatagcgggnngagctccgagcaagatcagctacaacccctggagcctgcgctgccataag

SEQ ID NO: 201 - DNA, 172 bp, Homo sapiens
  misc_feature (1)...(172): n = A,T,C or G
gtatttttgcggcaagcttngactaaatgtnggcnagcacacanagcagaancnatgaggnggttgnagcgctactcagnggtgagtnggngcantngaancaacctgtaagaaacaacagaaatattggtngcccaaanaaatacattgaagnagtcccttatacggaaaa

SEQ ID NO: 202 - DNA, 154 bp, Homo sapiens
  misc_feature (1)...(154): n = A,T,C or G
tttggcaggagctggagcctgagctnctgcagttcccggcattnagttncgaggtntacnccttcccggtgccgnnagaggcacctggagagaggccatgtcctgggcaganntaagggaaantganggngttactcggtcgagcggccgtctg

SEQ ID NO: 203 - DNA, 104 bp, Homo sapiens
  misc_feature (1)...(104): n = A,T,C or G
cagggatctgattttctggggctgnanctccatgggcacctgaagctacatggcagacacagtnagactnacacatcaatccaaatgtttttaaaataaaaaaa

SEQ ID NO: 204 - DNA, 197 bp, Homo sapiens
gaagacggggaaaggaagaggaggaggaggaaaaagaagctgggcctgatagattgaatctctaatcctagctaacacctaggaggcagaggcaggcaggacctctaaatttgaggcctgtctggtttacatggcagattccaggctatccaaggtttcatatagagtctctgtctcaataaaggaaaaaacaaaaa

SEQ ID NO: 205 - DNA, 280 bp, Homo sapiens
  misc_feature (1)...(280): n = A,T,C or G
tgttgggctgagccatgaagnncaagaaaatttttctgtacggggngagttgaaaatgtnggaaaantngagattgtcctacaaaagaaagaaagtgtnncttggcaantgtcttggngatcaccgtggagaaacatganttntttcattncaaagaaangatacaggcnttgtactacatgnacaggngccagccaatatctaaggaagatgtcacatcatgacactgagacttctcctgtctgatgcatgcctccaagcacctcaccttcaggcgcca

SEQ ID NO: 206 - DNA, 239 bp, Homo sapiens
  misc_feature (1)...(239): n = A,T,C or G
tgtttgttcttggtgccgttgcagagagactcagagcaacatctncattgtagctttcacatggnttgtgcaccacacccaaggcaaccatagctgtggtagagcttggtaaaagactgangatacacatgntgctttgannaaaaaggtcagntggctggttcccctctcanaaagcnttattactcccaaagccaacgtttgtaacatacattaacnntgctattttcgcttattct

SEQ ID NO: 207 - DNA, 550 bp, Homo sapiens
  misc_feature (1)...(550): n = A,T,C or G
gactgagtgattccttatagatcagtgatcattccaattaaaaagctgagcaatgcaatcattacctcnaacccgnggatctgtgtttcaggagagctgggagacaccggagtaatgcagattccaaagaacttgcttgagatgacttttgagtgccagaacctgggaaagctgacgtacagttcagattggccatgataacgtccggactgttagctaaatggctagtggattgtgtcatggtcagaaatgaaatcacaggacatacatacagattcccttgtgggcggtggcatggggaaaggcgtggatgacggcagcctggagagaattcttattggagaattgatgacatcagcttcagatgaagacctgggaaagcagtgtcggactccaccacagcagaaatctcccacgacaaccaggagactgagtattacctcactaacgggaaagcctgccaaacccaatgctgnacagatcctagaaggaattgganaagctgtgaacaatattgagaagcattttcacaaacctgagaaagagagag

SEQ ID NO: 208 - DNA, 434 bp, Homo sapiens
  misc_feature (1)...(434): n = A,T,C or G
tttaagggggggggggaattttttnccccctaaaggggccccctntgggggggnnnaanccccccttttnccccanggncccaaaaaaaanggccccccccccggttggggggnaaaaccgggggggcccttttcccctttccnaggggcctttggcccagggggaaaaaaggnaatttccctttanccaggaatttttttggggaaaaaggggggatttccatttttattggggccgggaaaggttaantgggaaaagggacccgnaaaaggaattcnttttaaaagggagggaaaaggntttctttgganaaacccncccaagccttaaangggccttgctttggggggaaaagttttcccaaaaccnaaccaanggggccaaaancccttttacccntttttttttgnaaaaaaccggggaaaaaaaaaaa

SEQ ID NO: 209 - DNA, 202 bp, Homo sapiens
  misc_feature (1)...(202): n = A,T,C or G
caataccaaatgccaactttaactggancaccttcctgcagcaatcagagantgaccaaagcgctgacaacctgtacatattccttataatctgtggactcagaccgntgaaggatnctctcgnacctnccggatgcattctcangaatggcatcaagnanacacccnntgtttacatggtgatngtaggtccttgagggtc

SEQ ID NO: 210 - DNA, 121 bp, Homo sapiens
ggcctctgggtgacaggaaaggctacgatatggacactgcttggtgttgagggtgtcttgggctggtcataccacagaggcggcaggaacgcttgagttggtgtgtgggaggggatagggg

SEQ ID NO: 211 - DNA, 191 bp, Homo sapiens
  misc_feature (1)...(191): n = A,T,C or G
agaggaactccgccgtctggngcccattaccagcgaccntcacagaagctgccgccgngggtgcccgtggaggccttctttcangcgctgcagtggggcacattatcgtgcctcaccaagtntggnnggagtgntnaccaagnggncaggtancgacctcngccttctatnattgcccgggactcgaaatc

SEQ ID NO: 212 - DNA, 131 bp, Homo sapiens
  misc_feature (1)...(131): n = A,T,C or G
acacgctcagccaaatgtgcanaactgtcaatcaacactaantagcacctgatggcttaggccgcggagantctcacacnaggatnccagacnggancctgggagaagtncaacatgaaagaatgagtgtg

SEQ ID NO: 213 - DNA, 178 bp, Homo sapiens
  misc_feature (1)...(178): n = A,T,C or G
gcttgctggtacgcattcctatngtagctcccagnacttttacaggtanccatggaaancangaggcngnggcctgagaagctgtgagncntgtangannnatagctgaggaagcnggagaccctgcctcaatnaaggtgaaaggagagaatggatntgtgaaagtaagacctttgaa

SEQ ID NO: 214 - DNA, 230 bp, Homo sapiens
  misc_feature (1)...(230): n = A,T,C or G
gtgccggctacagtggcccacacgcagaccctgatagactctgagcgactcttggaggcatatgtgagcctgcgggaactagagcagctganngaggagacactggcccgccgggcnctcttcagcctggtaccgacgcctacgcnctncntgnnctcctgcctcccttcaggtccatgctcctgacacccatctgtttgcagtantaaagccacgtctacgacagaaaa

SEQ ID NO: 215 - DNA, 109 bp, Homo sapiens
  misc_feature (1)...(109): n = A,T,C or G
gaagaaactactccctctgagagtnttcaacancagttgattttngctggaggcttaaaaccgtnanccctgnagagatcatcnttacagtgcctcgggaaaatgtgaa

SEQ ID NO: 216 - DNA, 121 bp, Homo sapiens
  misc_feature (1)...(121): n = A,T,C or G
ctaacctcctctatactcnccgnccntgntgaggggcncctccctccaagcctatccaacnaccaatgaggttgcagcactttcnntattttatataaaangacatcctactttctgaaaa

SEQ ID NO: 217 - DNA, 175 bp, Homo sapiens
  misc_feature (1)...(175): n = A,T,C or G
gggtaaagaacccaaccaaaaaagcaaagaagaaccaaccaancannccaagngcnaaggcaagnacccaaccgactgacctgaccaaactaactaccaaccaacagtcaacacaaaccaaccaaaatcncangcaaaagaaacnacagcgttatgggagcatgataaaataact

SEQ ID NO: 218 - DNA, 124 bp, Homo sapiens
  misc_feature (1)...(124): n = A,T,C or G
atttctgctggatgggncctntgctactggtcncatgtttggnaggttnttatngaacgtggacctgctggnatcttgacaatgaagagacggaattgcccccaagaattaaacaggtccatga

SEQ ID NO: 219 - DNA, 128 bp, Homo sapiens
  misc_feature (1)...(128): n = A,T,C or G
agcacccagtggctgactttatntaccccgaagacagagngctgggccatntcngatctacaggcaggaaaggantttatctanggaaggatcttanaatcaacagaaagnnaccttttttaaaaaag

SEQ ID NO: 220 - DNA, 180 bp, Homo sapiens
  misc_feature (1)...(180): n = A,T,C or G
gactgagtccggactgccgctgcagngnaagaggaagagaaggaagaagaaactcaccattccctgcccaaccccagccccacacccagagcaatcaacaggtaggctttcagacactactcaggaagagtccttcgaacagcaaacagatttaagcctggaaaagaatgaagagaaata

SEQ ID NO: 221 - DNA, 107 bp, Homo sapiens
  misc_feature (1)...(107): n = A,T,C or G
tacccttcaaaacacagtaccctgttcactgaccgaggtgatgagtgaggagntgcctaaagagctgnagccggaagaagaagctggctgntttccctgaagttgtt

SEQ ID NO: 222 - DNA, 120 bp, Homo sapiens
  misc_feature (1)...(120): n = A,T,C or G
taaggcgcctttggaaaaatngnttggggggntcccccctttcnnaaaggtnccttcaatttccctttncggccatttgggtaaaccatnggttcntttccnaaagggtaaagcaaaatt

SEQ ID NO: 223 - DNA, 138 bp, Homo sapiens
  misc_feature (1)...(138): n = A,T,C or G
actgaggtacttatcgggaggccagaaagaaaggaagtttttggnaaccacnctgggggacactgggggaggtttcaccaaatnncaggtttggtnaaggnaccccaccaaatgggtggggaaaggttttgggaaaaa

SEQ ID NO: 224 - DNA, 126 bp, Homo sapiens
  misc_feature (1)...(126): n = A,T,C or G
aggaagggtagggaagctgccaaatctggcagggnnnnggagngcggngaggaatgtgcagccgnncccctgcagagggagccagctgctgccgggaaaaaaggtttgggacccattcttgggaaa

SEQ ID NO: 225 - DNA, 107 bp, Homo sapiens
gactgagagagtctggtcacaccgttagcacagcctgctgaaactgttcttggaggttgatgtggacagtgtgcgcggagcccagccgactgacagaaaagaaaaaa

SEQ ID NO: 226 - DNA, 144 bp, Homo sapiens
  misc_feature (1)...(144): n = A,T,C or G
ttttgctacctgtgcccaccctgctggnacttcactgtgcccacagngagccctgtttctncgncngcgggnggnattcctgggactccttctttatacnctgtgnccttttactncttttaatcatggatttacaacactgga

SEQ ID NO: 227 - DNA, 274 bp, Homo sapiens
agcactcatctagcatgcaccagaccctgggctccgaccccagcatggcagaaactgcatctggtagctcaacctctcatctcagcacttggaagcagatgcaggagaattggcatctcaaggtcgttctcgtcaatgtcacaagttcaagaccagcttatgacacatgagatcctatctcaaaaaatatatatttaatattatatcatattgtatcttatgtcatgtatctataacattttctgtattacatttttttcaatcccctctataa

SEQ ID NO: 228 - DNA, 543 bp, Homo sapiens
  misc_feature (1)...(543): n = A,T,C or G
tgaggaacacagaaaaaggcagctcctctcagggttaaggaggggccctgggagtgaactagctgaacaagaagggatctaagtcggaacacacctagcaccggcatagcttcaggaaaggaaggtttccactgagcacagcctcaacgcttccaacaccgcagtgggtggagaacctgctgctggaagtcaacggccccaccctaccgggtccgaaacgtcccgacgattggcttcccataccagccacgcctacaatccttctgacgattggctgctctccttttcctgttctgccccctccaagcggccctctgattggttgcaggtctcggggggggggcagttccgcccctntcccggatggctgnattaacgcagcgcgcagcggctcggtntttcggtcccggccttggnggccgatccacccgagccggnccccantgcccagccgngctgctgcctcggacacaagcgcaggttgaaaactncaanaaacccgtgactgaanggctccaaggngaagtactcttgcatgtagtc

SEQ ID NO: 229 - DNA, 547 bp, Homo sapiens
  misc_feature (1)...(547): n = A,T,C or G
gactgagataactgaatttagactaatggatggtgctgtccgtgagtgcaggaactcctgccgagccacggaagcagctctttggtactgagatttatcagtctgggcactgccaactgaacagactttcgagggaagagaactgaggtctacgtgtcacaccatcaccttcctccctacaatggagtgccttcagcacggaggaaattataactacatttgttgtggcttttggttgatcaaatctgaatgtgttttcaaaacaggaaatccagacttctgcaaaggatccccaatcagtttcctgatttgcagagtggaatgtcttacctctatgtacaagcttatctacataatatataaaagtgtaattaaaaatcttaagtgtgtggggagggcggctgntgcggtaaattnctctaacccaaatatgctccggcaatgaaaacacaactnaatctaatatgaatacatgatgtgtgcctagnttggncagatntaccgctacactgncattttctncatctaagagatcctccccaaaggg

SEQ ID NO: 230 - DNA, 255 bp, Homo sapiens
gctggctccccgtgtgtacccgagcctgcagtctctgtaggagtcttagaatgacctgagcagaaagcaggagaaaccaactggagacctggctatttcatggaccagggaaacctgagctgagactcgcgcagccggaagcaggcactggaaggcctcccaagtgttaatctgctcttggttctttcctggaattcatttggaactcaatgtgtagattaaacagagctcacgactgacctttaaaaaaaaaaa

SEQ ID NO: 231 - DNA, 166 bp, Homo sapiens
  misc_feature (1)...(166): n = A,T,C or G
gactgagataacagaggagaaaacctgcctaggcaggaaaaccaggcaccagctatggggattgctgataaaatgctgctctaaagnnnagncatnanngagttagtntgttgccgagactgtangagattanacacagcaangtgacgcttgcccttacatcaag

SEQ ID NO: 232 - DNA, 227 bp, Homo sapiens
  misc_feature (1)...(227): n = A,T,C or G
ccttccgtacatttggaantgataccattaatgacaatccattcctaagctgggtactgnttggtggcagagcatctgcttagcgtatgagaggcccttctatcctcagctctaaaaaagaatctcctatgaagatttttttattgcttgaaataataaaataatgcgtactctaattacactcaccttttaaataaattttgcttctttccaaaagaaaaattttt

SEQ ID NO: 233 - DNA, 169 bp, Homo sapiens
  misc_feature (1)...(169): n = A,T,C or G
cgtagtagtactcaccantcaccagcagcagcagcaagattttgtgttgggaaggtacttccaaatgctacaggggacagaaggtcatcagctattggcccagggattatagcatggaagagttcctcttctcagaggatattaaaccttttgaggattaaaaaaaaaa

SEQ ID NO: 234 - DNA, 237 bp, Homo sapiens
tctaggtcgggtgccttaccagttgataccagtgcttgaccaaacggatgaggttcttcagcttgggtgcacgatcctccaggaagctctgatggaggtcggtgaagcagatggagaactcgccctccttctttagtgtggtgcactcatggatgagttgggcgtagattttgttgtacaagtagagttcagcatacttgttgtttctcagttcatctataaagaaagtgtctctca

SEQ ID NO: 235 - DNA, 178 bp, Homo sapiens
  misc_feature (1)...(178): n = A,T,C or G
tggggtaaccacgaacacaaagnttttctgcaggnacctgatagtaagccatgaaaacatctcccattgtcttttcactgctgagctgctaagcggaaaactggtgtgccaacaaagattggctccgagcaccacatctatatgaaagaacaaatgctttattttaaaaaagaaagaa

SEQ ID NO: 236 - DNA, 187 bp, Homo sapiens
  misc_feature (1)...(187): n = A,T,C or G
ccagccgcagttttgcggggaaggaggcacccacaaggccnccaattgcaagngtcaccacaggntcagcngcagagcantncagaagcacggcatatagaccccaggagncaagctctncaaacaacaaaaccacncttgcccacaatgacaaangccaannaaacacagcggaaaactaaaaaaa

SEQ ID NO: 237 - DNA, 134 bp, Homo sapiens
  misc_feature (1)...(134): n = A,T,C or G
agggggaggcggttttnggggggggganaggccgcggngcgggcggcgcgcagacaccagcgggngcnagcggagnangggacagagngccgggggggcnggngcggggggggcggncgacggcgcggaaggac

SEQ ID NO: 238 - DNA, 254 bp, Homo sapiens
tgaggtttccagatgtctttccagactagacccggacatgtgagccgctggctggacacaacatcagatcagccagcagaatggggaaataggagccatggaaaaggggtctgaagatccagatcaataataatatggaagtattatgggctggggctgggaggtagcctgattggcataagaggcaaaaatagattaataagtgctcaactactgaggtgcatttttcaataaatcttttctttttcctctga

SEQ ID NO: 239 - DNA, 247 bp, Homo sapiens
  misc_feature (1)...(247): n = A,T,C or G
acggagtttgaggatgtaacgcccttggtgcactcggncccttcctgaggacagactgacatcatggngtgttgctgncaatcctattcaggaagagaaaaccgaggaaaaagatacctgangagtgagagaaggctaggactaggattactatagcccaaagtcngaaagcaagccatttgctcanagaagtccaggcctattctcctcctcctcctcctctttnctttnctttctttcttttttt

SEQ ID NO: 240 - DNA, 146 bp, Homo sapiens
  misc_feature (1)...(146): n = A,T,C or G
ccccccattttggtagnctatagctganagacgattngcccgtgcgntgaaggacacactcctcgtgatggaacagcntgatttcttcccntggaaggccatcannctntctgncgncgatcccaagctttcccacgcacgcagcc

SEQ ID NO: 241 - DNA, 119 bp, Homo sapiens
  misc_feature (1)...(119): n = A,T,C or G
ctttcaatcttctttcaggaaccancctggaaagctgtaaacatctggacctgtgaccttcacncttgacacatggtggcnggcagtctagtaaatttctgctaagggaaaaaaaaaaa

SEQ ID NO: 242 - DNA, 171 bp, Homo sapiens
  misc_feature (1)...(171): n = A,T,C or G
agttaggggagattactgcaggctggctccatccgacaccctcgcaggnggncactgcaanctgtcacttncttctccnctgnnggccagttttggattncccgggaggagntccggtcacctntggtgctnggttancctgggatncttccagcaagggcttctcgccca

SEQ ID NO: 243 - DNA, 245 bp, Homo sapiens
  misc_feature (1)...(245): n = A,T,C or G
gaggttcctgatctatggcctctgtgaaccactggtataggagagaaggttcagacagtatggagaggacgtcagtagaanatanggancagttgaaatcagagaaaatagagaagaaaagatgatttaatgaaaatgcatataccttttgccagcagaagagaagagatttggacaaagtgattttgaagagataatatatggaatgttttaaaaaattgataaaatgttcaaaaccaaaaaaa

SEQ ID NO: 244 - DNA, 109 bp, Homo sapiens
  misc_feature (1)...(109): n = A,T,C or G
gagagaagaaatggcaangacgagttcctcaccccctcccatccgcngcctgtcccaagtttggncangcccacntctggntgcttntaaagccagctttgaaaaaaaa

SEQ ID NO: 245 - DNA, 408 bp, Homo sapiens
  misc_feature (1)...(408): n = A,T,C or G
gcagactggatgggagcggcaccctcctggcgcttctcgatttcttcaggttaaaacaggacccggcaaccgacaactgcactctacctgagctgcttctgggttcttcccttgggaaaaagctatgagcagttgcggccagcgtgagtcaggcgcccatggcttcgctaagccgctcctttgctgccatctgctggttgcaccggagaagttcacggagatttttcgaatgcanagaacaagtctcttaaaaataagaaagagggctgggggtggatggtagagcttgcccctagattctatgccaagttgcacaaaaatnaagtacgggaaggagggaaacatggtactgaggcacaaagatacgatgtagaataaaaacaacngggaccctgtttttgtaccttg

SEQ ID NO: 246 - DNA, 264 bp, Homo sapiens
  misc_feature (1)...(264): n = A,T,C or G
aatgatattcatgagaagttggcagatgaattcaaatttgacagcaagatgggatttatgcttntgaagtcccatcatatgtccttcattgggaagctgaanaaaagncctgaatgactagcaaatctccanaaaatagcattagcaagaaactgtcctggacaacaagcagttcatgttccgtttctatattttgaagactgcattggttctggtcagcaagtcctggctgattctatgagaagcaataaaaagcctttcaag

SEQ ID NO: 247 - DNA, 265 bp, Homo sapiens
  misc_feature (1)...(265): n = A,T,C or G
gcatttcttgacaggaattatagaagagaaaatcagcttactatccacaaaggactatggntacagagctatgaacacntgcaggcaaagcntngcaacctaacatgcctancaagatgcnttgagcattaactagacttagactctctttggattgaaaattcagngaaacccggccttccttggctattngtggaanagtgagtntgcgattttaaaatngngctnggagtnaattatatatancaagttttaactcacaaac

SEQ ID NO: 248 - DNA, 107 bp, Homo sapiens
  misc_feature (1)...(107): n = A,T,C or G
ggagaactaggattgaaggnccnccaccatatctggcttggccttgaactcttgatcttcatgccttcatataccaagtgctncaatttttttttttttttttttga

SEQ ID NO: 249 - DNA, 187 bp, Homo sapiens
  misc_feature (1)...(187): n = A,T,C or G
ccatctgtaacttcattaaggatgacatcngaactggagagnagcctaacatctatggactggtctacccctgctcaacacactccttccctctctcctttangctgtgaccagcgaaagctgnccttcctgtattctgttcnctggnaatgnaataagcatgatggtgccttctattacatcatta

SEQ ID NO: 250 - DNA, 162 bp, Homo sapiens
ctcattctcagcaccaactgggcgacacttaaccacctataactaactccagctgcagacgacctgatcctccttctggcatctgtggtcacattgcaccatatatgtacacacacatccacagaaattaacaataaaataaatatagtcagaaaaaaaaaa

SEQ ID NO: 251 - DNA, 216 bp, Homo sapiens
  misc_feature (1)...(216): n = A,T,C or G
aaaaggaaaacatagtccccagagnaagcagattccntcagtnnttcanacgaccccaacaataacgtgcgacggnnaagttatcagcnaggtgaanggagaggccaggttagncttggccaagccgannaatatccactatanctngnaaaaaaacctcaaatgaagaaaagccanagctgnctattggcagaanaatgcagggccagatgaaca

SEQ ID NO: 252 - DNA, 102 bp, Homo sapiens
  misc_feature (1)...(102): n = A,T,C or G
ctcacaagatcataacacntgcattanagaaattnaagggagagattgcngcactttaaaacattncatgnatagaaaatcacaatcgtggaaaaggaaaaa

SEQ ID NO: 253 - DNA, 141 bp, Homo sapiens
  misc_feature (1)...(141): n = A,T,C or G
tgcaggcagaatgccacagggagcgaaccccnctgccgagccntgaccgaatcgaanctgcctgtcctctgantgnncctgccaagatcaccancnggactacaggtctnggagntaccnaccgggccagagagtaacgcc

SEQ ID NO: 254 - DNA, 122 bp, Homo sapiens
  misc_feature (1)...(122): n = A,T,C or G
gggggcaaccgaagcantggctggngggccgggnggacagagattctgtaccctggnctnatctggctacgcngagattnnagacggtnacagatccnctggaaacatgccacgcggcacag

SEQ ID NO: 255 - DNA, 295 bp, Homo sapiens
  misc_feature (1)...(295): n = A,T,C or G
tgggagactctcacgccccccnncccntaactaatgtgagtcctgncaagcccttagtaatcctgaaaagggcctgggagagggagtacgaaggccccagccttagacaatcaagagccaacagtcgttttgcccgnctcggcatccacgcagtgatgtggggcaagcataaagagggcagcacacggaagaagcatcaggagacaatagaatngctacagggaaaaaagtgattnagaacctctccgaacaaattacttnancanngtttcttaatgcttagcaaacattaaac

SEQ ID NO: 256 - DNA, 271 bp, Homo sapiens
cctactaagctgctcaaattgcccactgactccatgatcctatggcttcagccaacggcagaccaatgaagattaagatgtgtaccaccaagcccagtttacaatctcataggtccctgaacctacttcagccatgaaaagtcacttcattgatatggcataaaacattttttacctgagggctccaaacagtgacatcattgtcatactggtttcgaaactgaaagtggaagaaagattaaatgagaacattacaaagttcaaattttaa

SEQ ID NO: 257 - DNA, 102 bp, Homo sapiens
  misc_feature (1)...(102): n = A,T,C or G
attttggggcaacaggngagcaagtttnaggnnncgancctgctaaaaaaaacatgaagcttgaggntnaggacntgccaggggcnatacagagaaaccgcc

SEQ ID NO: 258 - DNA, 144 bp, Homo sapiens
  misc_feature (1)...(144): n = A,T,C or G
aacctggtggcccactccttcaggngngatcaacaggcacacnnacatgggatagaagancaagaagacaagccgacagctcttcttcatatgatagatngatgaantatgtnngngntanattgnnttggtccaggcacatgc

SEQ ID NO: 259 - DNA, 174 bp, Homo sapiens
  misc_feature (1)...(174): n = A,T,C or G
acgtagtccgactgaaggctatgancacgacgagtacattttngaggaanatgctccaggtgttgctctgaggtnngntgtacttggagggcaccntgcaatgccnanaatcntggtcgtgttttcnncatgagccgcggnatccccattattgcntggtgaatgatgaggaga

SEQ ID NO: 260 - DNA, 115 bp, Homo sapiens
  misc_feature (1)...(115): n = A,T,C or G
acggaactaggaaaccagtntnacatcaaggaagataacacgtgtgnnaagaaganggncagtatnngcagtccacacatgtggtcttgntgaaaagactgccaggttgagtggc

SEQ ID NO: 261 - DNA, 168 bp, Homo sapiens
  misc_feature (1)...(168): n = A,T,C or G
ccagccccagttcctgactactgccctgctgcctagattcagctcancaccagcaaatctcctttggctgctgctatgaagactggcatattctccacggtgggactcctgcccagagagagaagcctttggaacaataaactatacctcattatattatctcataaa

SEQ ID NO: 262 - DNA, 302 bp, Homo sapiens
  misc_feature (1)...(302): n = A,T,C or G
gcagcaccagcatgagaacgcccacaaaagccacgaagaaggacagtgctgcttcngagaactctctcgggtcccttggcggggactcgcccccagacctcctnnctcgagtgagccttgggaatcattctcntgtcgctgtatgaactttcactccagcccggggaatgggagaattcanaccattgncacagagctctgccaatgnntcaacagagattccnaacacctnanatttgatggnatctttnccttcttngaaaagtgacattttncaccacatttaggaagaaaaaaatggt

SEQ ID NO: 263 - DNA, 127 bp, Homo sapiens
  misc_feature (1)...(127): n = A,T,C or G
gttcactcaccagctgtnaactgccagtcccaggggtatccagcaccctcttctggcttccttggcgctgcgtgcatgtgttgcacagacaggcaggtaaagcacttcacgcataagaaaaaaacaa

SEQ ID NO: 264 - DNA, 243 bp, Homo sapiens
  misc_feature (1)...(243): n = A,T,C or G
gggtgcttatgaggtacacgtgactgaganaacccggaggaaaccaccactctncttatttnacagtgcaaccagagagcncacaagatcagtnnaaggacctacaggnnntgggaagagcggaacatcccacgccctcaaccctgactcccaggcccnnntgaccctgggctgacctgccaggngcngnnattnttaaaacagcncaatgtntctgctgtttnccagaaaggacatgagatt

SEQ ID NO: 265 - DNA, 283 bp, Homo sapiens
  misc_feature (1)...(283): n = A,T,C or G
ggtacttgttgagttcctgccttggttcccttcatgagagaatacaaccacaagctgggatcagcctttacgngctcaagntgcttttggncatggtttttatggcagnatgagagaggaaactaggacataccatttnaagtcctgagtactaattattgaagtgctngtacanattattngtttttgntaggttagatccagagntgggnggctnctacctgaagcctgaatantgacttacngaaggcatganagcaggtatcatgtgttggagtccagt

SEQ ID NO: 266 - DNA, 145 bp, Homo sapiens
  misc_feature (1)...(145): n = A,T,C or G
ccctctccttggactgcnccttattgnatactgtatagggngtctnatattttggaaacctctgngaagantcnttgcttttgggctggngagacggctcagnggataagagcantgactgctcttcnngaggtcgtaaggacaa

SEQ ID NO: 267 - DNA, 114 bp, Homo sapiens
  misc_feature (1)...(114): n = A,T,C or G
caaaccacgttacccacgctgcgcantaagnggacgccgtggtacangatgtntntgncatgcccanggtacgcncggacgcacggncggactccacaagcatccaccggctca

SEQ ID NO: 268 - DNA, 111 bp, Homo sapiens
  misc_feature (1)...(111): n = A,T,C or G
gtagttggtaacctgatctgaaggtgatctggtgaanactgccaagaccagaagacccagaaaattcctattaagttangactncagagacacttttgtaaacgccaccca

SEQ ID NO: 269 - DNA, 178 bp, Homo sapiens
  misc_feature (1)...(178): n = A,T,C or G
accttcccattcctttgcggagctcacacaaggaggctcgtctcccgcaaacctcaacgccntgtccaagggtttttatctttttggtccagcagtcaaccagatgaactcatggcagaaccctgtggtctaagattatttaacatgatattaaaaaagtaaatgctaaaaaaaaaaa

SEQ ID NO: 270 - DNA, 115 bp, Homo sapiens
  misc_feature (1)...(115): n = A,T,C or G
ttgcagatcctatgtacgagcagncaatngaaaaacaggcggcngacatgaacgagcaattncagaggacgaaacacanngggccaacgcncttatnagaactctttagactcag

SEQ ID NO: 271 - DNA, 109 bp, Homo sapiens
  misc_feature (1)...(109): n = A,T,C or G
cggcaggtcatggactgtgtgaccgncatgagctcaacctgcnaaaggtggactgggacctcattcagcantaanctgggaagctggacctactaggacgatgactgaa

SEQ ID NO: 272 - DNA, 198 bp, Homo sapiens
  misc_feature (1)...(198): n = A,T,C or G
gtaagggccaagaagaagcactcngtggaaaaanggtcantgnattgaaccnctatacaatcnttgctngcnggatntaaacngaaaatanaagggantctgtgactcctgccactgccgtgtgactatgaaagncaccgngctgntcctctnttgggccgactaggccctggacanggcggccgagagtgctgggga

SEQ ID NO: 273 - DNA, 104 bp, Homo sapiens
  misc_feature (1)...(104): n = A,T,C or G
cgtggctcccgcggccatggaacacattntgatgctctcaagttttggaatttttttgtttgnttgtttgtttncattttgttttctgctggcttaaagcattt

SEQ ID NO: 274 - DNA, 213 bp, Homo sapiens
  misc_feature (1)...(213): n = A,T,C or G
ctatgacaacagtgggagaccacatctgcaggngggagggaggcaaaaagcccaggncntgggntgccttnacctgacatctgancatgagttctccgtganagcaggagtntttggatggnatagagggctggcanccctgaacccctgccttactannccttccgcncttngnttgnaatcaaccttggcagatntgctgaaactttgtcc

SEQ ID NO: 275 - DNA, 116 bp, Homo sapiens
  misc_feature (1)...(116): n = A,T,C or G
gaggtgctgaggatgctggactctttttctctgttcctgaaacctntccaaggcagtttcctcttccctctgcagcagctgcaggnatggacagtgttctctctcactgtgaccgg

SEQ ID NO: 276 - DNA, 130 bp, Homo sapiens
  misc_feature (1)...(130): n = A,T,C or G
ccagcacacaggacagacanacaccctggggttcctgnaggcatgaaggnggacancagggaaacgtttgactatttantgaggacaggacacctgttgcacaagaatgtgcnttaatgtcattgaaccg

SEQ ID NO: 277 - DNA, 206 bp, Homo sapiens
  misc_feature (1)...(206): n = A,T,C or G
gaggtaaactggaaatggnagttttgggcngganccatggctnagtgggnaagancacccgctgntctttggaagggctgaagaaaaccnnccagcnacnagatggtggataacaancatgttgnaanaatgatnatgaccgctcttcttggtggagtgtgatagaacgacagnctacagtgttcattacatataataaataaata

SEQ ID NO: 278 - DNA, 158 bp, Homo sapiens
  misc_feature (1)...(158): n = A,T,C or G
cactcggcagggccggntggaggtgctcaatgacngaggactgnagggagttnccngtggcaccccgaagcccgtgntggagcnngtntgactccaacgcgtgtgnagcttaacgagggcccgctgccttnntctttcttgccgactctgaggacgac

SEQ ID NO: 279 - DNA, 169 bp, Homo sapiens
  misc_feature (1)...(169): n = A,T,C or G
tcaacctcaagggctagaagtncaagcttggcataggancaacactntctctgcctgctganctctgngactatgggcaggaatttacaagcggncttgacacctgctnggcttttacatgggtttggggactccaatatctggtcctcaccttgcatgaaaaaaaaaa

SEQ ID NO: 280 - DNA, 209 bp, Homo sapiens
  misc_feature (1)...(209): n = A,T,C or G
atttggggatacggcccganggttagcacctatgctcttttataggacctgaattccttccaccnacagagcagccacaactacctgtctactccagttccagngatctgacgccctcttctggnctccagaaacaccgtatactgcatcgtggagcacatgcatggaccgcacaggaaatactcatatacataaaagacaaataaata

SEQ ID NO: 281 - DNA, 420 bp, Homo sapiens
  misc_feature (1)...(420): n = A,T,C or G
ttcagtttaagcatttattgtncgcccacaccagctcacagaaatcagcctgcctcagtagcctagccggcctcctcagtgttgcccagaaaggagtgagccctgcggctacatcctgaaagcctgactagggaaatgagggaacaaataaaagacaaattnagatacaacaaagctgatataggctgtgcatggcnctntgtggngagacataccaacngcgactcaaactcacaggtttaactctgaattgagngcacagatttctacagtgagnnangaggcangattagctaatctacggnagggggntgnctncaanggcnagtcncangcctnnaaacannccanannaagaaactgcanggcagannatngggcnaaacanaggnnagaaggtnttttgtttgtccttgttga

SEQ ID NO: 282 - DNA, 160 bp, Homo sapiens
  misc_feature (1)...(160): n = A,T,C or G
agtttaagcatttattgttccgcccacagcctttcattttcctgggcttggcctgcttcccccatgcactggggttgagccctgtggctgtacaggtatggccagctaatnctgccagtacaaggtcagaaacaatcaatgggcataatctctctttttt

SEQ ID NO: 283 - DNA, 167 bp, Homo sapiens
  misc_feature (1)...(167): n = A,T,C or G
atgtatttgtaaaacaaaaantcaattgnggagnagcngctaatttttcaaacaaagaatctgagctgnatnnnttacagancagtaantgcaacgccgagtagcngctatncttaccaacaaagaaatctatactttnttttttntggtctacaaaaatgcatccg

SEQ ID NO: 284 - DNA, 112 bp, Homo sapiens
  misc_feature (1)...(112): n = A,T,C or G
ttactatatatataatataggaagcatttaatagaacagcatcntaatatatgtgtactttgcagttatgactgccagnatggcattttntggaagatattctttattgaaa

SEQ ID NO: 285 - DNA, 126 bp, Homo sapiens
  misc_feature (1)...(126): n = A,T,C or G
cagtttgaagcactttntctgtccgcccacaggagccgttgccttaagtcgtttctggaacactgtgggtgggaaataaaaaagtctttttttctctgtgtgtgtggggagttggaaagggtgatg

SEQ ID NO: 286 - DNA, 181 bp, Homo sapiens
  misc_feature (1)...(181): n = A,T,C or G
ttgaagaactgtattgtgcgcccacngttctgtnaaaatgcagctcaggattctttgtttgaaaaattagcgctctngcgttgcatttttgttctacaaaatgaagcacagatgcttggttcggccgcataacttcgtatagcatacattatactaagttatggatcgatccagcttgggt

SEQ ID NO: 287 - DNA, 117 bp, Homo sapiens
  misc_feature (1)...(117): n = A,T,C or G
acccttgtggtagccctaattaacaggcccaattaaaagaaaacacctaatncaaacacngggtttgcccnctnnacctttataaacttgtnanttgtctatgggccacgggtgaat

SEQ ID NO: 288 - DNA, 221 bp, Homo sapiens
  misc_feature (1)...(221): n = A,T,C or G
ccgcccacacttcatgtttttggaggtagtgtngtctaataggagaaagtaggttggtttgtnttctttaagtttgaatttgagcaggaacttattnttacttatgcgtgtgcacatgaatccaggtgntcatggaggccagnntatntctggagttgnacttagggaaagttttgagccactcagtntgantacaggaacctggagctgggtacggttga

SEQ ID NO: 289 - DNA, 169 bp, Homo sapiens
gataagatggagatcgagccgttcaccatgcagcctttggagatgagggtgccgtcatagaagtcctacaccgaggcagtgctgacctgaatgctcgtaataagcgtagacagacgcctcttcatattgctgtcaataaaggtcatcttcaagttgtgaaaaaaaaaaa

SEQ ID NO: 290 - DNA, 212 bp, Homo sapiens
  misc_feature (1)...(212): n = A,T,C or G
ccctcctgtgcgcagncncttcagtatagtctccatatcagagagctgagttgagtggtcacattgatgagngacctgctgncgtctntgaaccaaagcgtggnctttcnttcccacatgacctggnaccagggtctgtagaaacggaagtanagaanngaaatnatnagacatcctcttcgaatcaagttgagacattttgactccaggga

SEQ ID NO: 291 - DNA, 193 bp, Homo sapiens
  misc_feature (1)...(193): n = A,T,C or G
aaccagaataccatgtcccgctccttgaagangttgattgtggcaaggntaaangcaaaggctcacanattacatccagatggtagtccagacacngnntgtagagaaagggctccagaaagctgncattggcagaacagcanacnaattggaagatagaggaangatattaagaagttctaaacttaaagaa

SEQ ID NO: 292 - DNA, 308 bp, Homo sapiens
atctgagggcacagcacatacacagcctttgcaaatgcctgctaaatgctgtcaaaaacatgcctcaattgaaatggagggggagcaaacagaagataaggggaaagccacccaaggtcccacaagtcatgtacttacttggtcactagagcccctgatacctgctcttaaatagaatgtttttcctgttaaaaaatactttctatgtggctccaccctcttctctgtctcccagaaggaaactgctgtgtacattcttttaaaacaaacaaacaaataaaaccattctgatactggaaaaaaaaaaa

SEQ ID NO: 293 - DNA, 211 bp, Homo sapiens
  misc_feature (1)...(211): n = A,T,C or G
gaccaggggagaagggttagaggncgagcanaaccgagccctnngaggaccctcaacaaggnaacgggcaggcnacngagaagcngagngcaccgccaacagcagcaaccctcccggaatcacgcgcgcncgcgcacaagagacaggcgccacgccagccataagcacgccggcngcaanaggaaaacaaaccaaaagcacccagagaccg

SEQ ID NO: 294 - DNA, 119 bp, Homo sapiens
  misc_feature (1)...(119): n = A,T,C or G
aacggaggcctctgagtagaactccnngaactgctgtaactgacgcatattgacgtaagtatgctgcttctgctgataatgcaacatgggaaatacatcggtgtcccacaaaaaaaaaa

SEQ ID NO: 295 - DNA, 111 bp, Homo sapiens
  misc_feature (1)...(111): n = A,T,C or G
gagacattttgccgagagngaagactntggctcagcttcntctancaanacccagnagcatcttngggacgccagncnttgctcagaagacccccagacggaggaggctct

SEQ ID NO: 296 - DNA, 327 bp, Homo sapiens
tgagcttaacaggagcattggccaccagcagaagggcatcactgtctcaggcctcaagccaggcacccatctctggatgccagtctatagcgggtaccagaggaaagctggcagcagtaactctctccccatgcatcctagccagtgagtgctacatcctttgcaagtggagttactggcctacccttaccccatgcattcttcctgtctgcactgcctgggccaaggggcagaaacactctgctcttcttccccaggacattcccaggcttggggtttttctataggtttgaaagtaaaggggggagggtgggaagggtgggagga

SEQ ID NO: 297 - DNA, 127 bp, Homo sapiens
ctgcatcttgaaggagcgagtatcaacccctgagttgttggactgccattccagcttctgacacccattccactgcagtgcctgcttctaagttttatgataaaaattttaatcttaaaaaaaaaaa

SEQ ID NO: 298 - DNA, 159 bp, Homo sapiens
  misc_feature (1)...(159): n = A,T,C or G
aactggacatcaagcctngagagctgcacctgctttttnttaccatgncnagggnaaacnaggttctctnataaagcgtcacatctaaacagcncgccngcttnggcagtccctgacagtatgttcaataagcagaggccgtaaagaacgctttgaacg

SEQ ID NO: 299 - DNA, 149 bp, Homo sapiens
  misc_feature (1)...(149): n = A,T,C or G
gggccactttgtgtgttttttttnggcaagcatatggatcccagccagactttccacgngtgctcccagctcccagctgagaaggccangggttctcttcctgggtaaggagacagggcagaaagatcaaagagtttggggagctggat

SEQ ID NO: 300 - DNA, 489 bp, Homo sapiens
  misc_feature (1)...(489): n = A,T,C or G
aagggcctcatgctccgagaccccactgagnccacaatgaagacgcagcacaagatggcgcacacctttaatttcagcactcagagggcagacacaaatgaaaatcaacttggtctacataaggagttgcaagacagccagtgctacactatagagaaactctgtctcaacaaaacaaaaccactaaggacgggctggttgtgctgatgatgacagaagtcagagtctctcgccttttaggcaagtgcntgtactgctgagacaaacaccagcaacttagcaagactgtgacctggggtctggttttatttattttctgaatcaatatgaattttcttaacacacatttgtcgaagtctgtacaaaccaaacatttctatgttttaaaaatgtccattattacaaacatacaaagaaanggaaggtgctaccaaaagntactcanttacattataaaatgctgtcataatttttttaaaaaaaaatcaa

SEQ ID NO: 301 - DNA, 106 bp, Homo sapiens
  misc_feature (1)...(106): n = A,T,C or G
tgcccacacagccatccagggcattatcagccnnctgcacnctcctccggctccaggatggntanggnatgaatctgtgggaagaggaggcgggatgggggaggag

SEQ ID NO: 302 - DNA, 164 bp, Homo sapiens
  misc_feature (1)...(164): n = A,T,C or G
tacctcaaacgccggtagagngcagacncagaaggncntttgaagnnaggnctgangactctcacagtacccattgnaggaganggctagccatcctcacagnccaatccaaganctttaangacagcacatgccttctctggaactatatattaaacctgaag

SEQ ID NO: 303 - DNA, 332 bp, Homo sapiens
  misc_feature (1)...(332): n = A,T,C or G
acgagaggagacctgctggtttctganagttcctgtcgaaacnncggttctgnnctggagtgntacnttnagnacctggnccttagagcnnnaatatgaaattacatccagatgaaaaccttggggcngaaggggaaggaaataatgaccaagtacctcactccaaagacaaatatgaaacatctgaagaagccnagataggagttgagttccagggcatggganaactcagttntgaccctgccagaaaggngggactcatacctganatggctgaactcaggaaactatcttctaatagcatgtccaagatataaatcttgcctcaaata

SEQ ID NO: 304 - DNA, 152 bp, Homo sapiens
  misc_feature (1)...(152): n = A,T,C or G
agcagacccgagcgcctcactggtcagaataacatgggcaggccacttgcagcctctgaccttagntttctcatattgaagatgagagtgtcagttncattcagactttgtcaacactaggaaacgagggtcaagaaaaatggataagaaga

SEQ ID NO: 305 - DNA, 103 bp, Homo sapiens
  misc_feature (1)...(103): n = A,T,C or G
cttgtgtgtggcaaagatcaagactgcgaaaaggcatgnngaaagncaaggtacnttntgaagcangataacacaacacagggtggngcaagacgaccaagta

SEQ ID NO: 306 - DNA, 125 bp, Homo sapiens
  misc_feature (1)...(125): n = A,T,C or G
cttcgggctccccgcgcgcccgtgcgctgctcngccccgntncnactccccccccnccccgtccctccccccccnctcncccctccctngtccnccnccggctccccctgcgcctcccgccgccc

SEQ ID NO: 307 - DNA, 286 bp, Homo sapiens
  misc_feature (1)...(286): n = A,T,C or G
attgaggctgactaggactgcctgcatgcacangactgtggagccatgcactgaagcctggntaacggacacaatagacncactnctanagaaaanccgacctcgtcctgctcatnanntgaacttgnggattgccnatagttnctcggcctgtggaanagcctagcgaactcctctccnctncangctggaatgtnnactgacttgatctcatgcatngtcttgggctggtaagcacagatgntgtgagctnatgagtgccatantcatgccatgcccataaaag

SEQ ID NO: 308 - DNA, 159 bp, Homo sapiens
  misc_feature (1)...(159): n = A,T,C or G
gaggtcccgaatcggtggggcaaggatgatggacttccacctctgactatgccatttccatctgtatgaccctggggaaaccactgaagcttccttcccttttgtacacnttgttttaaaaacaaataattatattcaggtgagccaaaggaaaaaaaa

SEQ ID NO: 309 - DNA, 332 bp, Homo sapiens
  misc_feature (1)...(332): n = A,T,C or G
cacaggtctgttgctatgaagaaagaaggttgcgntcagttttcatgagcagnatggacagagatcccagactctcctgatggagtggaggaggtcctggaaactttcaggtgcctgcagctggctggccaagagagacccacgctgcgtgcagcatctgaagagacagccagagcttgggntnttcnggcntnggtctcactcannatgccntattttctnncanngattgnncatnatcaaccagattttttatagaggctttgcataggactcccttggctctnaagagatctaagatttgttgcagccttgattattagggatgattg

SEQ ID NO: 310 - DNA, 122 bp, Homo sapiens
  misc_feature (1)...(122): n = A,T,C or G
atttgcgggaaacaggnngggattttgggggncaaaccagangcggggcaccangccgcccgccngaggncngtgcgaggccccaggnggccgngcnnagccggccgggaccaggacgacga

SEQ ID NO: 311 - DNA, 394 bp, Homo sapiens
  misc_feature (1)...(394): n = A,T,C or G
tgagacttccctccatgcctctgcggaccaggaactggacacacaatgaaaggactcactgagccaaggcagcctcggggcatgcattttggaagcgccaaatctacttcccttcttgagtctcatcaccattcaaaatggaaccagaagctactttgtaaaatggagctactacctaagagcagagtggtgacnggctactaagcctgagttccatccctcagaatccacagggtggaaggagtgaaatgactgctgcaattggttctccgatctctgcatggtgtctatggcacgacagtgccatccacgtatgatgtcctgaaagaccctgcttggaatgaccgtgagcgcgtgcgggggtggggtcggggggaggggtgatcacacgctg

SEQ ID NO: 312 - DNA, 308 bp, Homo sapiens
  misc_feature (1)...(308): n = A,T,C or G
gccagccacatccactgtgggggangctnangaagctggggagccatgtcttattacacgtgccaaaaagctactgaatataancntnncaaaangctcaagacgnggcacctgntggcgtggagagaaggcgccatgtttaagagagcttantgntcttgaanaggaccctgggttnggtctcccancccccacacancantttcacanntcataggctancttccaattccagaaaaaaaacccaacgcctttttntggcctctgagggcactgcacncatgaggtgcacagaaaaaatacagaca

SEQ ID NO: 313 - DNA, 105 bp, Homo sapiens
  misc_feature (1)...(105): n = A,T,C or G
ccataacagtatccgatgcacaacggnaaacccacggctcaaccattctttggacgatntcgcccattgtcctgtananaancatgacctctatctaaaaaaaaa

SEQ ID NO: 314 - DNA, 108 bp, Homo sapiens
  misc_feature (1)...(108): n = A,T,C or G
attttggggcaacggttgagcagcttcaagcaccttgcgtagaanctggctgncaccaacatngggacatccnanncctcagagccttgagccaatacattcctgtgt

SEQ ID NO: 315 - DNA, 373 bp, Homo sapiens
  misc_feature (1)...(373): n = A,T,C or G
cccttcctagctgctgctggngtnccggggtggcaccgngcagaggaaaaacagganaggctttgnagctggagggtcctgagngcaaggngcctgcctgccacatgactctgggactagtccctctctcagcctatnatgacaacattgcctctnaggtcaccacgaggattctgggacatctctgaaaagacggtngcacacantgtttgaggactgtttgttctcacctgccccagccactcacccttgttccctcctagtcttatgggaaaccagaggagggacatttgcccttctaaggacattggtgngnagaacttactaaatatgtatgaaangcacttgtaanttattcctccactatttccat

SEQ ID NO: 316 - DNA, 360 bp, Homo sapiens
  misc_feature (1)...(360): n = A,T,C or G
ggatgccagggaaggtggagcactgtgttcnnnctgnagcgcatnttngagcgcatnctnnagcggccgccagaggagcagcgnntttacaagggtgaccngctncctgangntggcnnnactctgggcgaatatggngttcacctanncagacagnntggccatangcccnagccacngtgggcctggccttatgagtgaaaggaaataaaacttgacacctgtcataaatgnanngnttggggactaganaatggntacccagntaaanagcctatactgttnttgccaaggaccctgatgagaagctcacatccatctgcaacgtgcaatgccatgagtatccaacaaaattttgaa

SEQ ID NO: 317 - DNA, 288 bp, Homo sapiens
  misc_feature (1)...(288): n = A,T,C or G
gactgagtttttgagnactgtctaatgtcagcctaagnactagccccaaactcaccatgtagctgctgctgctgctgctggattccttgtgggaatgactgcgaacgactcggccatcaaagaactgaccatctagaggcangaaggagatccagcctcagcacccgctaagtagcctgatgccggctcaaacctttcagcacctgaccctgggcagttagtttattttaggaatatttaagcacagagaaatttttgggaaaaaaaaagtntcctggtgacaatgaa

SEQ ID NO: 318 - DNA, 227 bp, Homo sapiens
  misc_feature (1)...(227): n = A,T,C or G
gtggaaatggagtatnagccgtgcaggggtgcctnctccccttgacgtgtctttcanaaccagacgcgggggncattcgtaaaggtatctgccacaaagcttgatgaantgagntngatcatctgagacccanatggtgggagggnagangcanntncngcaagaananctgnnacctgaatacacctcnntacaaanaaatacagagagagagcgaaaaaaaaaaa

SEQ ID NO: 319 - DNA, 472 bp, Homo sapiens
  misc_feature (1)...(472): n = A,T,C or G
gactgagcctcagagagaaatgcctgccagggcctcgtgaccatgaatgtgctgcctttgaaacaaatcaaaacaaccaaaccattccaatgacgataataataacaacccacctgcaacaataactgaagaggcaagaatgcatcctaggccttgaaagngngnntgntgnaccctntnnacnntnacnnnangccncncaganngtntggagacacatgggaacacanntccngngnncttaccntgacctgngcttttanntcntngtgcntggnnctggtntggncgactganatgactcntncgtgaagcaggtcttggtgctccagtgcagctgccgaagatggtctctcgggaacagttacggatctcccacgtaccagatccctgttcaaacttcccaactcgtgtgaggtggcacatttgcagacccagtagtgaggaagctgaggcaggagaagaacccccc

SEQ ID NO: 320 - DNA, 395 bp, Homo sapiens
  misc_feature (1)...(395): n = A,T,C or G
ttctgaggactaacctaaagtactggntgcagtataactctcagcactggatggttctagtcgttgactgttaagacactggcttcaagaacaggaggtgtgagcctgagcttggctctgtagtgaagagttcttcttactgctctaggagacccaggcttgatctccagctgcacaaacatctgtaaatcccgttctagtgccttcttctggacaacttgggcacaagacgtgcacatggtgcacagacacatatgcaggcaacacactgatgcacataaaattaacccaacagganangnaagcnaaaatttattacacnngngttggggggagccgagaatgacanngtatcaccttgacgnnatctaggatctacaattgcctaagaggga

SEQ ID NO: 321 - DNA, 512 bp, Homo sapiens
tgaggtggggtctttcaggaccggcccgcgccccgaacactccggctcttctcagagcccgaccgggcgacccgagccactcacctcaacgaagagcaacatgtctgcttccgctcggcccgatcgttcacgctgccgcgactccaactggctcccaggcccgggccccggtcggtaggataaggacactcgccttgcccctccacccggcagtggacccggctcctcccccgccgtcagccgctgcgccctgacccgcccagtccctcctcccgggaagcaacaactgtttccggttctggaggaaaactgcttccgggggcggagggcctgcccgcccctgtgcgtgcttcgctccggcaggctcgtctgtggcggcgaaggcgaaagtgtgtggtacgtgtcgcgtgtgggtcgacgcccgggaggccgcgccgggctgtgcaaaacgctcactaaagcatttgtactttctaccaaaaagctgacaccgcactgctaacccttgcgca

SEQ ID NO: 322 - DNA, 176 bp, Homo sapiens
  misc_feature (1)...(176): n = A,T,C or G
tggcatcctgcgcgaagtcncgagnacggacaggtaggtctnnggtagaagggagcanaggcccgtctctcaagnngaaggtagcgccantacgtnnccgggacaangagcgcagtggnacctgagtcnggggtgagncggnnnccttgaagtgaagaagaccgagaggcaggaca

SEQ ID NO: 323 - DNA, 178 bp, Homo sapiens
  misc_feature (1)...(178): n = A,T,C or G
gtgtgacaccatgtcttaggagnncgnatccaggaactctngngcgcagaacatctgnnattatggagcgnctatgaggctncctccangagaggcacgtacannggnccccttgtcntgaacactgtctcctgccctgcncagagantgtgacatctgatgaactccacctctgctc

SEQ ID NO: 324 - DNA, 130 bp, Homo sapiens
  misc_feature (1)...(130): n = A,T,C or G
ttttggggacccgccggcggntttcgagnncgaaccagagnggaaaaggncnnggagaggggngccggggacgagggnagnagcacgggagccggcaaaggccctanaaccncagaaccgaggagagagc

SEQ ID NO: 325 - DNA, 130 bp, Homo sapiens
  misc_feature (1)...(130): n = A,T,C or G
agaacaaggatgccaaaanaggaaaccacctttactttggattccctcccctntgactntctccgcctctctccactccagcctccncctcaaagaggttaagaaatgtggcancgccgaaaaaaaaaaa

SEQ ID NO: 326 - DNA, 120 bp, Homo sapiens
  misc_feature (1)...(120): n = A,T,C or G
ctggaaatagaattcnggggctctggccagcngacngggatcttaactgctgagncatntttccagccccggnatntaaatccctcccccaccctngnatttntttttaaataaaaatgt

SEQ ID NO: 327 - DNA, 309 bp, Homo sapiens
  misc_feature (1)...(309): n = A,T,C or G
acaggctcctgcattnaacgataggggttgaagggtgtgcgaggagtgcnnnancangtaatgcnnangccaccgcctaccatgggnncgcctaccatcatgactgcctaccatgggccactgcctatgctgggctattccttccttnctgaggacacccatggccacccaancagggncnttgtgctttaaactttgtngactcattgaaacattnngcaaanatgngtgaangctagtccatgttcctgnatactcagaaattgaactttagatnanaataataacatatnactttaaaaaaaaaaa

SEQ ID NO: 328 - DNA, 248 bp, Homo sapiens
  misc_feature (1)...(248): n = A,T,C or G
cccgtgaactggtccgggcccatttgncatcttncattgaagccgncgcctggagaatctgcctggccagacacatgatnatcccacaggggaacgtgcgcagnacgtgatgctgcncngcntccgngggtgttcatgactaanatgtccttcctcatggcagnctgcagtagncacatngnacacgcnctgtactagnacctgcncaccgactgtancgtantctgctgnattgatgacaacagtag

SEQ ID NO: 329 - DNA, 320 bp, Homo sapiens
  misc_feature (1)...(320): n = A,T,C or G
tcctctgtgcgatgcagcaggcatccttcagnggatagaatgtngtatccacatgtggagcatagcgccaggagataaccacgtgtaccagtgatggaataccttacatacttcaacaagagccctaaatgtacctgacaaagcaggaaaatgtagctagcacctctccagcnttcccgcctcatcttggngctttcccaagngatccgctgggagatgatttctgcttggngttaaccaagaaccttcaggtcatccgtacactggccctgcctctcacggaggtcgtgtntccagataaaantctctcttatttaaca

SEQ ID NO: 330 - DNA, 122 bp, Homo sapiens
  misc_feature (1)...(122): n = A,T,C or G
aaaccagtaagctgttgtttgacaggcaagccccgctntgccccatntcgncaagtcctgntgaggcccanngaggcggcaggaacntatggagcaggaactggnacagctggcccagctgc

SEQ ID NO: 331 - DNA, 178 bp, Homo sapiens
  misc_feature (1)...(178): n = A,T,C or G
ttgggacccacagcagcagccacanctacctgtctactncagttccagttgattcngnctgctcctcttctggtggngnagaaacaccgcatactgcatcngtcggagcacatgcatnngaccgcacaggaaanactcatatacataaaagacaaatnaatnaatctaaaaaaaaaaa

SEQ ID NO: 332 - DNA, 182 bp, Homo sapiens
  misc_feature (1)...(182): n = A,T,C or G
aggagaagaccccaaagagangcgcgggnaganacgagcgaacccgacccnaaaacggnggnangacnacangangggcccnaaaangaaaccgaagaaacccgcaaacccgnnggnaagangcnaacacagaaaccacaccgcgagacgaggcgaccccggaaggacagcaaaggaatcaa

SEQ ID NO: 333 - DNA, 415 bp, Homo sapiens
  misc_feature (1)...(415): n = A,T,C or G
agactttgaacagacctcatagctcctcccaaggtgataaatgcccaccctttccctgggcgagcagnccngcccagagcagcatctaatccgcccacttcccaggcggnggagaacaaaangacggcagacctagggtncatgcagcagtcccgccccctcgccctgcaaccaatcggattctgaaggcccgccccttccgcttgagaaatgcgacttctnagagcgtcttccggcgggagctgtacggctccttaccatggngacgantcatctgtttgnanagccanagatnatnttttgnttggcaaagctnctacnnnaatttagactctntttagctgaacgnngnncctnnnagatncttntgttctgagcaancaacctantgctcactgncttcctggttatgtgg

SEQ ID NO: 334 - DNA, 302 bp, Homo sapiens
  misc_feature (1)...(302): n = A,T,C or G
gactgagtgagacttgtgccttgtgctaactcgtggtgagagctgagctgnnctgtgaagaaatgntccaagaactttccagtgaagtttgtgatggccctcagggctgctggccatcagccaggcttggaagtaaccctggataaagaagaaacttgtagtggtttggtctgatgctgcttgtattcgaatgttaaatgctgncttctcaagatgtngttgantcttaccnataccaagtgatgctatgtgaaacttctccccaatatanctggtcaacgagagggtagagcctgtgattg

SEQ ID NO: 335 - DNA, 400 bp, Homo sapiens
gaggtggggtctttcacccgaaaaccggaaatgcggctgtctgttcgccttgggcatttacccaaattacctgggctggaaggctgtgagcttctctggcaaatcagcccgtgacgtctccaagaaagtcctggagctgtcaacaagccgaagagataagatgttggcctttctataacttaccatcttcagcccttcgtcgtgcctacccctggtggatgagaggcattcggaatggtcaccagggctcctcagggcattcatggcggaataggctagactttgtgcgtttcttgtttgtctttggttggttgctgaggatgggaaccatagccttgtgtgctatatatgtacaggcaagtgctccatcactgaattacaacttcagtccccttcaaaa

SEQ ID NO: 336 - DNA, 250 bp, Homo sapiens
  misc_feature (1)...(250): n = A,T,C or G
tcaccatcccttaggtnaagaccttctgnngcagnagatccgataaggccagnnnatgctgnagttcctcctttaagcanatngccccnccttcagatggctcacctctcctgcaangagaggaacctgggnagtttngactcncatttcctgtgcanncangagagagcaacancccttanaaactanggatactatacnanctgccttggagactctnaagacttggaaacatgggaagaaggcccac

SEQ ID NO: 337 - DNA, 237 bp, Homo sapiens
  misc_feature (1)...(237): n = A,T,C or G
tgaggtgcccaagaacaaaggacaccatggnagcaagccagtctgcatgccccttgggacactgggagccactgtactaccagaagagagttatgctggcttacaaggagctgaggcagacctagggcatgtggccctagctaccacatggttccaagtcaaacaaacaatgaccagtttccatgacatatttttattgatttagatcatcaaaatagtacattccattcaacacca

SEQ ID NO: 338 - DNA, 121 bp, Homo sapiens
  misc_feature (1)...(121): n = A,T,C or G
gactgagccgaaagaggggganagcgcnccangatccattccaaacgaaaaaccnnnaggagacgcggcngctcccaggatgttgatgntntgtttttttgacataatatcttcgcactca

SEQ ID NO: 339 - DNA, 412 bp, Homo sapiens
gactgaggtggaagagcaagctttgccttagtgaggcccaaagggatggcaaagctttcctggagggtccaagtgaggaagactgaccagagggtgcacagaaactagcaactgcagcatcttccttcccgacatttacagcctgagactgttcacctcctacagagacccaataactcctgcctctgggatgaccctaataaacatcctgaggttctggggtggtgttggggtgctccatcagagttcacacagcccacctgaccgcagcttctctatgcatggtctggacttctgtccgctctcgttttctcactgcctccagtcagggttccaagaccgagtcacatggggtatggcaaaaaagggaaagaatgttaattaaacctattatttaattataaaaaaaaaa

SEQ ID NO: 340 - DNA, 421 bp, Homo sapiens
  misc_feature (1)...(421): n = A,T,C or G
cttgtgaaaggaactcctggaagtcacacaccaaggtatggacccaccaaataccccaattccagagattcttcaggctttcttagaaaagaacaacccaataataggtaacattattgagtgataacntcctggccagactgtagacccacctactcttctcatttagtctttcatttaattggacagcaaatctgnagatctgtagagncagtactgtgtctctgtgctttactgtaaatacgagagtcaacagtgaagagattgaataacttattcaggtgaaaattgcctcttggttttagatgacctaacaccaaagtctgtacccactctttatcctgtcccatctattttaaattgntactacctcccttgctncaactggaaaataaatttttctaaattgcaaaaaaaaaaa

SEQ ID NO: 341 - DNA, 118 bp, Homo sapiens
  misc_feature (1)...(118): n = A,T,C or G
tgtggagctcagacttgnncctggggaaacttcaaagcttcggactgcaggggcttcaagtgcttgnagaaagattcggggacctacagggaaagtggagacgtgaataaggaacccg

SEQ ID NO: 342 - DNA, 244 bp, Homo sapiens
gactgagacctcggcgcctgcggaccgtcatccaaatgcatccagcactcctcaggggaccgccctgacacaacatgacgtctgtttgcctcagggggaagtccctctcatcgcctagctaccgggaagcgagaagagggacgcgtagcccgaagttgtccggagaggccctcagcctgcgggaaggggctaggaggggacagagagtctcggccgctagttggtgatctttttgaactcagca

SEQ ID NO: 343 - DNA, 302 bp, Homo sapiens
  misc_feature (1)...(302): n = A,T,C or G
tttgcttcctgggctatgggcagtatgtcagcgaattaaaaatgcaaataacaccagaaactccaggaaggatccctgttttaaatccctttgaaagtcccagtgattattctaatctccatgaacaaacccttgctagtccttctatctttaagtccacaaaactaccancatgatctnancgctcanaggcangaggtnnacatncaggaacggcccanaccagctncagaaacagnncacaggctttacaagccagctggttacagctgaactactcanatntacctcagaccacagac

SEQ ID NO: 344 - DNA, 249 bp, Homo sapiens
  misc_feature (1)...(249): n = A,T,C or G
gcctggactgatgtgggtctgcttggcaggaacagatgagccgttcagtgcctaccatggatggaacagtacagcacagatggggacagactgcaaactctgcgncccttaagtanagagcgcnctgggagcgatacngtgttaccgggggcatgtcnnannatntganattntgagttgganntntgttncacccgncatgncnnacngagngactnaatgatcaagttgagccaacataagagggga

SEQ ID NO: 345 - DNA, 366 bp, Homo sapiens
  misc_feature (1)...(366): n = A,T,C or G
ccccgcacttgtccagagggtccccagcactacagaaaccagtatggctggtgcacatcgtggaatcccatcactttgggctcttcatttgcagacctagaagagcagcnatgggcagacgggaggcaagttttcccgaggtttctacaagtctctttcctcccagccactctccagactctaacttccacgtacacttgcttacttatttaagaaacaggggtgagatatgaaaaatggctagtatgactatactctcagctacagtcttcctgcaaatcaaagataacccaatctcttgaaactaccaggnttgtctcaattcagtgtcatccaaaacctgaagtgttctgtgaaaaaaaaaaa

SEQ ID NO: 346 - DNA, 206 bp, Homo sapiens
  misc_feature (1)...(206): n = A,T,C or G
cgaggccacgcgtcaccgcgttctcccgcccactccgtctgacgncaaggggcgggaccagcccgacggcgccaccgttgaccctgctgttaccaggcgctcacacagccaatcagcactcgccgcaagcgccggccggcctttgaactccgcacagcaacttcctgctgtttggcgagtacacagtgcaatgcagtatgtctgtc

SEQ ID NO: 347 - DNA, 257 bp, Homo sapiens
  misc_feature (1)...(257): n = A,T,C or G
gatctgcctctattacctgtgcaacggtccacttgaacccagcctgcctttatcattgcatgcacaggtcagagaaggctcctgaaattttcatantanatagctnccttcctcagcnncatcttgnaggaggataanaaggggcttttgttccnntnttcgccatgagacctnagcaggggtcagnccaggcagnctctngtgaaggtaacctgngaattnactcgccctcactttgccctggctcactctcccat

SEQ ID NO: 348 - DNA, 193 bp, Homo sapiens
gaggagccgggcgtcctgctcgggaggcaccagcagcctcaagtcggaaaactcatcgcgctccgcgcagaccccggccctctcgctcagcttccggtgcctcggaacctcctctccgcagttcagtgcaacctgcatgcgactccgccgccggaacccatcccgtaggcaacacagtagcgatgaagcaaaa

SEQ ID NO: 349 - DNA, 127 bp, Homo sapiens
  misc_feature (1)...(127): n = A,T,C or G
aaagtgcacagtaattanggagtagctagcangnnanagngaccccganctcttgcacagagngagnataagccnagtaaaacagtctttccatgacaccctttngaggcacctcaggtgtgactac

SEQ ID NO: 350 - DNA, 105 bp, Homo sapiens
  misc_feature (1)...(105): n = A,T,C or G
actcagcatcaccacatagacactgcttctagagagagnngatgtnanacatgaaggagctaatggatgaggaggatgttntacaggagtgaaagcacagaaccc

SEQ ID NO: 351 - DNA, 130 bp, Homo sapiens
  misc_feature (1)...(130): n = A,T,C or G
gatccagcagagagaatacagcattatggaggatgnnntaaaanatcntgaagcanagaggatggccnaagactccagatcttccgattacaggagtgtatcaccantccaagccaaaagaaatttcttt

SEQ ID NO: 352 - DNA, 173 bp, Homo sapiens
  misc_feature (1)...(173): n = A,T,C or G
ggtgggcctttgaggtgatgatatagggacatgagcaccancaccaccaccaggaggnagaacaggagagcagcgatcactgcccagtatgatcacntgaggcnggacaccaggtccacctgctttnctggatcttnggggtctgtnggagacaggcacagtgtctgagatac

SEQ ID NO: 353 - DNA, 124 bp, Homo sapiens
  misc_feature (1)...(124): n = A,T,C or G
gggactgcgcgggtgagttaaacgaggananagcatncagacgagngccntgnctggacacacatgnagtactacannagaagncacgctccanaggacntttagaccttatcagctccgagga

SEQ ID NO: 354 - DNA, 123 bp, Homo sapiens
  misc_feature (1)...(123): n = A,T,C or G
gacagcacatacaaactcagtcatcatgcngcccccgnncacatgntgcaganncgcacacatgaaccagacannttgcgagtccagtccacttggncagacancactatgaaccacgcaggg

SEQ ID NO: 355 - DNA, 194 bp, Homo sapiens
  misc_feature (1)...(194): n = A,T,C or G
gagcgaacatatcgtaggagacccanagatgattatattataacanatgagtctatctctacaaaaacttcaacgagttttttacatcagaacatgttggtcagaagaagtgtagagaanagagntcaaaancttttaggaagaagtgaagctaangtttgttctcaggaagtgccacataactattacctctg

SEQ ID NO: 356 - DNA, 103 bp, Homo sapiens
tcattttgagactgctcaagttcctgtgatagatctaataacattattccttaaaatattttgttattttcaaaagagaagttttgaggctatggagatggta

SEQ ID NO: 357 - DNA, 103 bp, Homo sapiens
  misc_feature (1)...(103): n = A,T,C or G
aaaaacctttctcggctgtacacggttttaanggntgacatttccagtgagaactcanaattgagcanccgatgtntttgcaagccttgccattattgcttat

SEQ ID NO: 358 - DNA, 151 bp, Homo sapiens
  misc_feature (1)...(151): n = A,T,C or G
gactgaggtggggtctttcagtcagcaaacagnagcttgcctaaatctagagccgccctgtggtcccagcattgaggacgctgatgaagggtcaagagttcaagtatactacgtgccatctctcctcccccactccctaaaaaatacaaaa

SEQ ID NO: 359 - DNA, 178 bp, Homo sapiens
  misc_feature (1)...(178): n = A,T,C or G
tgtttggtgcttcaagcaagaagtttgtagagggagtgaacttgctgattctgtatcaacacctgggtgggggttgggcgggagggtagtttactttgttgtaaggacttgatncctggctacagcgtnttctatgaaacctacttgnaatccnatgcctggaatttggaagcatatg

SEQ ID NO: 360 - DNA, 220 bp, Homo sapiens
  misc_feature (1)...(220): n = A,T,C or G
atggcaggtagtgcancatgtaagttcgcacgctcggacgagctggnacggcactatcgcacgcgacacggnncgagaagaagttnagctgncccatntgtgagtaagcngcttcatgcaggagcagaccaccntgacgaagnacgcacgccgncacgcnaactatncacccangcatgctgcagcggcgcggcggtggcctcgaggaccggctcgctca

SEQ ID NO: 361 - DNA, 168 bp, Homo sapiens
  misc_feature (1)...(168): n = A,T,C or G
ttgggggaaccacagcccgcagntttggggggaaaaacggagggaaggnnacagcagagcggcagaananngccagggnagganaaacccaggagaaaagcaaacagangaagaaggagacgaanggancagagaagcaganannggacggcgacggacaagagaact

SEQ ID NO: 362 - DNA, 124 bp, Homo sapiens
  misc_feature (1)...(124): n = A,T,C or G
gccgaatgccataaagcatggatggcnacacgtcgngttaaacnnngtnacactggcgtaggagttgttgnccacagngaccctaggagccctcaaacaataaaggctatcacagtgggctgca

SEQ ID NO: 363 - DNA, 164 bp, Homo sapiens
  misc_feature (1)...(164): n = A,T,C or G
ctgaacagaccttactcatgtactcctgaagggatgggcgcccaccattcacaagcggntgtgacggaggcatnatgcttctgccacagtaaggccctcctggactgaggataggaatttgggggacccagctgaggagaagctgattaaagacatattagatg

SEQ ID NO: 364 - DNA, 441 bp, Homo sapiens
  misc_feature (1)...(441): n = A,T,C or G
tcactcattcaaagccaacnaattggcggntgctcagccttgaggaagcctctgcagcagcatcacaagtgtccttctcctgaagaggctcttgatcccctccagcccccaggacagcatcggctcgtnaatgtctgccagtcagataggaagcaacatctctgtaggttctttcataaatggagtcttggctcataaatagaccgtcttacagaggagtnaangactccttagatcaattttgtagatgtttcccctgatcacgactacataattagaagacatagtattgatacagaagcacctttcctttttaaatttaacattagacttgcangganangcaaaaatgctaatgactgccatggngaactccttgaaactacctccaccctttgccaaggtaataaatccaacctactacaactccaaaaaaaaaaa

SEQ ID NO: 365 - DNA, 107 bp, Homo sapiens
  misc_feature (1)...(107): n = A,T,C or G
atcaagggaggtaatctttgcccnanccccttgntttgtaggatagggnaancaactggtagaatccanagcctnncccggaaaagcatncacatcatcaggcaagc

SEQ ID NO: 366 - DNA, 144 bp, Homo sapiens
  misc_feature (1)...(144): n = A,T,C or G
ggagcaattcccaaaacctcatcanaaccggaaacgacaaacaaagaggccatttctgttcttgtaccaagcttgagtccttccttaaaataccattaaccaaaagccaacaaaatccatgaatggccactgacaaaaaaaaaa

SEQ ID NO: 367 - DNA, 182 bp, Homo sapiens
  misc_feature (1)...(182): n = A,T,C or G
tactgaggtgggtctaggaactgcggtngcagcgctgnntcaganggccananttactgtcgctgcggaacgtctagaaaggnanggncaggaaggatggntggctcnaggagctgaggacctnctacattcnatgggtnaagactatgccaaccgagccctgcccattcttcatttttatt

SEQ ID NO: 368 - DNA, 127 bp, Homo sapiens
  misc_feature (1)...(127): n = A,T,C or G
gcaggcagaccctgttcatntnatctgacctccaactagcctgagctaggcactcntctcttctncgggggacnttgcagctncccgggggtgtgcattggaatgganttcggaccttggactattg

SEQ ID NO: 369 - DNA, 137 bp, Homo sapiens
  misc_feature (1)...(137): n = A,T,C or G
agtgggtgttgtgctgtggcctacctgggctgtagnccntnntgactnantnggggnctcttgagnatctccactggagnnacaancactgataggaacctgaagatcggcacagcanacggcttactactgggcca

SEQ ID NO: 370 - DNA, 160 bp, Homo sapiens
  misc_feature (1)...(160): n = A,T,C or G
gactgaggactggacccatcctccagnatgattctacccaggatgctctagcaaaacctataaagaaaaaatggaccaaaaccacggtgtcaattactataaggtttccttgtctcagacagttgacgggtcaccatgcaaagtatctgaaaaaaaaaaa

SEQ ID NO: 371 - DNA, 509 bp, Homo sapiens
  misc_feature (1)...(509): n = A,T,C or G
actgaggcttcctgggatggaccccngcacaagcangagagccacctgcaccaatatangaagctattnggaataagacttccattttgagtggaagtggagtaaagtttaagttcccaagacctccctgggaactgacaccctgcttggcagaaagagacatggacatgggtaacctgacatactgattgacaagttaagacatgaatgttaggcaagtcccattctggttgacaagttaagacatgaatgtcaggcaaagcaagtcccccatcacagttgaataccccaaccaatggaaatagaacaaatgtacaacaaagaatttcctaaggaaattccctatccctaaatcctgattggtggaataatttggcacagatgtttgtagatcttggactcaaaaagccctataggatcttgttacagttagctcccatgtcttactcgtggcactgatcgatcagtcttggagtgtggtattcaataaaccacccttgtttgactga

SEQ ID NO: 372 - DNA, 317 bp, Homo sapiens
  misc_feature (1)...(317): n = A,T,C or G
atgctaacgatgtcggcaaacttggnccaggccgggagcagctcttgcatgacagcacttgcatcatgagctngnatnnactgtatnacgannaagtgggcntgacagtccagnaccntcnatagcacancagggtcatgtnngctcangtacctttatgcacggatgctgantcccagtcagcatgcncaccancttgaactncggtgnnctanccatanttttnctgcagagataggccctcagagcnngaccgtgctcccganntctagactacaccctcagcaccggagancatgaccttaccctaaggaaaa

SEQ ID NO: 373 - DNA, 224 bp, Homo sapiens
  misc_feature (1)...(224): n = A,T,C or G
atttgcggggaccacgcgcgggcattnccgggggcaaccngccgcggaaaancgaggagancaaggacgganntgntgacaggnccggcggaacggangccaagcccgccaagancacgaagaacangganaacgcgaagcgcaaggcccgcagcannaggaacctaaacaccccgnncaccacagacaaggaaaaggcagagaagcagaagcagggccaaccc

SEQ ID NO: 374 - DNA, 516 bp, Homo sapiens
  misc_feature (1)...(516): n = A,T,C or G
attacatcggtcctganagagganctgngacctaggctcctaggtcctggccgacctggtgancaagggagactattccgtatnttccaccacaaaaactggcngccnctggnggaaagagatgctcaagcggccaanannagnccagccctggagaccctccagctgcnnactggaccctgctgacctnaggactganggacttnattntccanactttctgagcatgctgtggaagcccaagcntgtctngnncgnattctgncccgcnngctgngnctagttgcaccagcttatagaagctgcggcggctgctgntcagggaaacttggagctttnggaganaggcaccccacccaaccaataggctgnccttggnacggagcggngcggaactggggctgnactagcaaacagcccctcctactnanacaacactctttgtgtggacagccgggcaagcaaatgtgtggncccgcagtgtggtccctgaggactatatgcttccagagtact

SEQ ID NO: 375 - DNA, 304 bp, Homo sapiens
  misc_feature (1)...(304): n = A,T,C or G
aactatccgcggcatcgaaggaagccggctctggttgctggtggacggactggttccttgctcacactacatggtacaagtgaatgctnctaacagcagagggagcgtgctcagtgaccctgtttccgttgaaatgcctcccggnggtgagnctgngaagactgnggttggctttctggttttaaacaggaggaccannaatagagnggcaagtgagctctgncttttagaatagaaggnctctgctgtagttttgnatgntcaggacattntnttttctgaaaactncttattgattaatggg

SEQ ID NO: 376 - DNA, 403 bp, Homo sapiens
  misc_feature (1)...(403): n = A,T,C or G
cggctaaggagacaggatgctggcctgaagacacacttggaccagctggatcagcagataagtgaactacagctggatgtgagcaggtcttcttgcgaggccttggatagtgacagcagacccagctcaggtatggntcacgatgactggacatccgcgatctgggctgccaggatcctaccctgggaagggcagtacagcatttactgtnaccnntcagggacactgtctgacctgacattangaatagtgacagcttcagcctgtgncctcagctgatctnacagttgggaggtcccttggncagcctgggaagtgtatgtgacatgaagacttgaaaaagctttaactaaacgngccgaaagaaatatgtaaatatagtatatatttaaataatatataa

SEQ ID NO: 377 - DNA, 394 bp, Homo sapiens
  misc_feature (1)...(394): n = A,T,C or G
gggagcggctcaatagctcacatnatgccgcantggntgaggtgaccttngcngagagagaanaccattgacatgngtgcatacntccgcctatgcacttctggaggtcttggcacgggccntgnaggntatagantgatgcannatnccttagcaccaactgctatgaaaagcacagccagttacttcctcctncagcagcccacaatcaacttcagcagggccaccgctggcgcctttncactgaccacccaggccttcggcatgcccatgggggcatcgtcagtcagngatccctttagagaagtgaaagccaagactgggacccagagcccttacagaattcgtcggttccttagcattaaactgatcactgaacctttaaaaaaaaaaa

SEQ ID NO: 378 - DNA, 165 bp, Homo sapiens
  misc_feature (1)...(165): n = A,T,C or G
gtactggggagctttactnaggangaatgggctttgntggatccttcccagnannagtnatgtncaaagatgcngangctcgaaacctacaggaacnctcactgncataggctatanctggtgaagaananaatattgaanaagattgtgaaaattctgtaagac

SEQ ID NO: 379 - DNA, 224 bp, Homo sapiens
  misc_feature (1)...(224): n = A,T,C or G
tgagtggtcaaggcattgactctttgctctactggccctgnatcaagaactatgcatccactncatcnttatccgtcatccttaatgactagcgagctttggaagctcctggattcagaacaanaccanaaccgcctatgacttctcggattgtttgggctgactnccgccgnaaccacaaaggnggtgttgccaccacagnggacccgaaagacatgtattgg

SEQ ID NO: 380 - DNA, 378 bp, Homo sapiens
  misc_feature (1)...(378): n = A,T,C or G
tctgagggacctggctgtcgggctngggcgcgctgaggtggtgggaccnggaccggcnngnattcctngcnactctctgccangaaggactttncnnantgaaancggaactgtgtgacgcaaggcncaangtggangtnnggtgtcttcagnccctcttgtcgattgtttnccngcnccaggcacatgcatctataataaatcaaagcgggccctcggaaaagttcttactcccttccctatgaggactccccctcccccanctctatnancgcctttntacttccntcnccctataaacncctgtgagcctacccctggcaaacttatgtcccctcacccttctgccttgacanaccttagattcaaaaaaaaaaa

SEQ ID NO: 381 - DNA, 102 bp, Homo sapiens
  misc_feature (1)...(102): n = A,T,C or G
atccataaggaagtctgacctctgtcgcacacnccnanncggatgnagacntcctgaccctggaccgcccggggcggcagtgctggtctggaggacctgatt

SEQ ID NO: 382 - DNA, 246 bp, Homo sapiens
tcctgaggacatggttctgtggctgcttctgtggcagacaagtgtggagaaggagggagtcacaggactgggcagggctacatggccttgggaagctgtctgttcttcctgagcttccgtgtccacgtagtcaccaaggaggtcctgtggaacactgaacagaaagatctctctaagaattatgaaaaatacttccatcaagaataatttgaggcaataaaactccttgttttaagtaaaaaaaaa

SEQ ID NO: 383 - DNA, 128 bp, Homo sapiens
ttttactgaaccatcactgacttagacattcagcccacctcccaccttgggatagtatgagcctgggaggccacctgaaaagcttaatggtaacctatattaaaaccttttaaggagagaaaaaaaaa

SEQ ID NO: 384 - DNA, 293 bp, Homo sapiens
  misc_feature (1)...(293): n = A,T,C or G
gcagaatggaaaaggctggatcctgctgccanccaaaccggggcctgtctccatgaaantggangacattntanctggaacccagcagggatggatcagtgatgggaagaaacatcaccttgactacggactgaataattatgtctacagattgccctcantngaaacctataccccctcccatgttgggaccaganagatggcctaggacagccaccctatctctttgcacctcatcccagtgtgaccttattgaataaattaaaattttctgcttttcactaaaaaaaaaa

SEQ ID NO: 385 - DNA, 214 bp, Homo sapiens
  misc_feature (1)...(214): n = A,T,C or G
gactgagggagcaaacctctggacagcaagaaagcatattcctagaatatgagatactttgagggganaggagnananaggactgattgagtctgnagctcatgctgccntngaactcannctgggantaggancannncacaccacnccgactttaaanttagcatncaagangnnaaatgtaaagagcagatatgcaacccaaaaaaaaaaa

SEQ ID NO: 386 - DNA, 512 bp, Homo sapiens
  misc_feature (1)...(512): n = A,T,C or G
tgaggatttgccagcttagaaggcatggaagcaagacaaggataaactagcaacattgataaaaagtgtgtgtgtccctcacatgtcccagaggaggtacacgaagaagccctgtttcttcccaagaaggctaagaaagaagagaggcagggaggcagggcctccgcagtgtctggctttgctctgcatatggctctcccatagctctcctgtctgaacctgaaggaagactccaaatctactacttcagtgactcattggaccttgaaatatgaagccttgctcttgggacacgcatctttaccatttcaaaggcctanangaaaagaatnccttgctgtgcccacagacagaggctgacatccgagggttccttacatgctagaggtgacagtaggccttactgggacaagtctttctctagtcacaaaatgttcctgcattcccttagcagcagccaagcatgccttgctgcctggccattccagcacactcaggcgtgccataaagag

SEQ ID NO: 387 - DNA, 170 bp, Homo sapiens
  misc_feature (1)...(170): n = A,T,C or G
gggccgtagatgagctgggggctagattgancagaatagctggctnggngctntgcgaggggggggaccaggannctgggatgatgaccttatngagatgnctagccactgnagctgctagcatctntgggnacagcntgaaaanaagngagaagctggccaggctggct

SEQ ID NO: 388 - DNA, 324 bp, Homo sapiens
  misc_feature (1)...(324): n = A,T,C or G
cggagaggcagaggagngtcccgccactgtcccgggtgtggnctttgttcccaatcaggctgggggcccaaggcatttgccccgccccagcctttgntnctttctcggcagttcagcgctcacccttcggcgggccacgcccccaccagacccagnctctggactctcaccttcctacctcaagaaaggagggcagtttntttgtgtaacatncgtggctgtccgggaattcgttattgtagcgtnctgtagactcagntanccaactnacagagatncncctgctctctgnctcttgagagttggantaaatgctcataccac

SEQ ID NO: 389 - DNA, 102 bp, Homo sapiens
  misc_feature (1)...(102): n = A,T,C or G
atttttggggaaccagaagggccgannttagagncagaaccgcaggccacaatcacganncgngnggaacacgaaaaggtcggacaggaagcaaggccagga

SEQ ID NO: 390 - DNA, 125 bp, Homo sapiens
  misc_feature (1)...(125): n = A,T,C or G
tagggaccaacccagncgaccngagctccacccaggaagccccacgtagnaggagacaacgggagagccanaganaacnacatgcangcacngngcaggaagtangcaacaccccaccctaccaa

SEQ ID NO: 391 - DNA, 126 bp, Homo sapiens
  misc_feature (1)...(126): n = A,T,C or G
gagactcggcaacaggctgctgccgaccaaaccacnncgcggccatgtgcctgccgccatgctnggctccntncctnccccagagcgctnttnctggnntnccatctggctgatggcaggaagcct

SEQ ID NO: 392 - DNA, 164 bp, Homo sapiens
gactgagagcctactgaagctcctgcctcactgggacccggggaagtagaagaccagaccctgaaggcaaggtttccagagctgcctctgtacttccttctctatggagccccaagtcagaaaaaagactcccccagccaggatcaccaactcctcaaaaaaga

SEQ ID NO: 393 - DNA, 216 bp, Homo sapiens
  misc_feature (1)...(216): n = A,T,C or G
atggattacccagcctnaaatttcttgctgtaagaacagaaaacagactacggaaaaatgtccttctgtggtggncaatgaaccaaagaactgcatctnctgtgcctgccagtccttgacaaacagtggcttgcaatgaaacacgctccctttcaggacagagctgcgagttgctcattctacatctgcaggcacaaaatgtataatgtttgatgg

SEQ ID NO: 394 - DNA, 187 bp, Homo sapiens
  misc_feature (1)...(187): n = A,T,C or G
acacgatcccctgccatantgtctgcggngctcgtggnctcctcaggctaccantcctatggnnggganaggaatgnatgcagcangctctgnacccatatttgtctttacatctgaagcatttcgtcantaacaagngcaaaaggaggacatgtaaataaaacctgggcntgccaccgtcaaaata

SEQ ID NO: 395 - DNA, 414 bp, Homo sapiens
  misc_feature (1)...(414): n = A,T,C or G
gttatcatttgtgagctnanctccaggacacacgagcagctnntgantgtccatttgnaagggatccaacctccaggtcatcacactgaatggccagctctttctctgtgaacctgttcaccatacacttttaaaaaccaatgaacagtgtgaacaacccanactttaattcgttgaacatcgaatgttnctggatcaagaatgcgctgaatgatgtcctcactgtccaagannaagcaagctccatnccttgctgtgaaannntgnactgatcagactanatntacagccttgacctcnatttgatanncacatatnnctggnncacacnacngattggaacntnacnctgattatatgacccntttgatgatgncgnacatatatagagaaggagctctgacactggcctgt

SEQ ID NO: 396 - DNA, 353 bp, Homo sapiens
  misc_feature (1)...(353): n = A,T,C or G
gagcgcgtattccgtggagggcgcctgggccccaagtagcaggaaggcgccgctgctggcctctagccgctctggtacgcatgaccccagaggtcgcgtcaagccctaggctgccgccctttgtttncggggcgtgcctgcgaggcgaggacacacaggccggactngggggnctagggtcatagcatccatnacctgnccgcactcttgggctaggtgaaggagaagggaccaggcgccgctcacacacataccccactcccagcccccgnccaacattnccgacccctcacaagctctagctgtacttcagggaaacgaatannaactatttttaaaagaccctaaactaa

SEQ ID NO: 397 - DNA, 325 bp, Homo sapiens
  misc_feature (1)...(325): n = A,T,C or G
cggggttaagcctatagcaactnctgaagaanctttggcaagactcaggaagctggcttcngntgtcagganagnatagnagcagnagnagcagnggggatgatgcnctcaccagcaggaatgaaagantagctagctnatgtctgtgacagaatcngcgggangggagcagactggtgaagaggccagnntaggatattacactgganancttgaganctgcnngcgncggagactgagctgcctgnccgggatgctggggantgaacnngcagtactnctaagaacanncagctgcaccagntctccagctctgactcgacca

SEQ ID NO: 398 - DNA, 214 bp, Homo sapiens
taaatatcggtctctcaaatgaagtaagatccaaactaatcagatcaagcacggaaatctattagcataggtctggggaaaatgtaagggcctgaggcatgtgttcagaacatcacaggggctaccacaagtaaaatcggaccttcagaagactcgttggaaagatgacctgctttaacctgcatttcaaggaaaaagaggaagaaagagaaaa

SEQ ID NO: 399 - DNA, 398 bp, Homo sapiens
  misc_feature (1)...(398): n = A,T,C or G
actttttcagactcgagnntgagattcacgacccgaaagcacgatgatgtttgctcagtcccaactattattgtacgtgacgagcaggctcagctctacggaagccctcagattcaggttggcaacatctgctacgggcggatagtgggcactgtggatccgcccaacggancccgntcanccccgtggaccactgcagaccccgcagttccccgcanagccgcaggctacgccactaggcggctcgcacacggagaaccggnttacccngcgacccggacgctttccaatgtcccgntctangtncattggntganccgncactcagcccactntcattggntacagtnnttngagaagnaggcatngaaacagaacngaaggtgtggcctaagagg

SEQ ID NO: 400 - DNA, 285 bp, Homo sapiens
  misc_feature (1)...(285): n = A,T,C or G
acagagacaggaagaatcttggngctctttgtcntcagccagtctagccaatcgtgatgaagcatcatgaaaattgtaaaatccccaggaatgggaaaaaccgacagcgagtctcatcaggaagtatacaccaggactcaatgttccagtaaagaaacatgccacttccgaatatgcatcaggatcctgatggggtggtgcgcacctgtgacctgagcactctgtgatgaccagagttccagagcaccctggctatatagcaagaccttgtctcaaaaaaaaaaa

SEQ ID NO: 401 - DNA, 141 bp, Homo sapiens
  misc_feature (1)...(141): n = A,T,C or G
agacagtgcctgatttaggctaaaaaggtngaattgtcaanatgcaggtgactcggcctataagctcatggngagataganacaggatnaagagttcaaggacagnttgagctcaaccacatgagaccctgactaaataaa

SEQ ID NO: 402 - DNA, 229 bp, Homo sapiens
  misc_feature (1)...(229): n = A,T,C or G
tggagggctggagagattgatctttgcaggggacaggagttttgttcctagaattcaggtcaacgtagcntgacagagcctataatttcagcatctagagtttctcatgccctcttctggtctccacaggtaccttgcattcacacagatatccacacacaggcacacacatacacataactaaaactagaacacaattaaaatttttcttcctccctaaaaaaaaaaa

SEQ ID NO: 403 - DNA, 155 bp, Homo sapiens
  misc_feature (1)...(155): n = A,T,C or G
ggcctgatagtgggtgcgcagcancagcgtggngctcggagctccctctgtagtaatggactaactgaacttagtgaaggatctatacttctgaagagcattatgatccggngcctgttacattcccatgataaaggtttagatgtgggttctgg

SEQ ID NO: 404 - DNA, 105 bp, Homo sapiens
  misc_feature (1)...(105): n = A,T,C or G
cccctggtttatcctttnaaagtgaacangacacactgnccagtagtcatcaancaaaagncatgaagacactcncaacaaattgataatttataaaaaaaataa

SEQ ID NO: 405 - DNA, 135 bp, Homo sapiens
  misc_feature (1)...(135): n = A,T,C or G
cactggagctcacattcaagaatcatggntgnaatgccacggncgctttcctttnatgacaacgtngggtccaccagacttgaanaantacgatctcaacanccngngattggatttagtctgtgaaatataaag

SEQ ID NO: 406 - DNA, 285 bp, Homo sapiens
  misc_feature (1)...(285): n = A,T,C or G
cctgtctgcttgctggcctgtgaagancggatatgcctncganggtggtctcacctgctgggcaagaaaggngccagctgccacgaagcatgacagcagagggcaagaccgnttaaganacaataagtacttgncatngttangggccggggagcntgtcctgtnggtacgngtgtatgcntgcgtntgggctccatcggcaacacttgtaagaaacaaaaaccnaacnccgaantgctgacttattcatcaaggngagtttgaccnatgctttgggggccttca

SEQ ID NO: 407 - DNA, 238 bp, Homo sapiens
  misc_feature (1)...(238): n = A,T,C or G
attttgtggtacttctaggnaanttccacacggtatccagcatcctccttctntncctcatnagtgccaactgtaaagctntncatngntggaaaatnngangaatcaaaaagggataaatggattgacatccacaacccagccaccaangaagncgcnggtagggantcctcagaccaccaaagntgaganggacgcaggcgncgagtcctgcaaacagngctttccctgcgtgggc

SEQ ID NO: 408 - DNA, 120 bp, Homo sapiens
  misc_feature (1)...(120): n = A,T,C or G
caaggctgaacagctgtcataangntgccttntgaaggttttgcgcattganntatggnanggttanctttnntacgtcagagaaaccaagggtaaactgcccagctacaaagaaaaaaa

SEQ ID NO: 409 - DNA, 156 bp, Homo sapiens
attgatatatggtggctctttacccataaaaggaaattttcatttgctagcatttacttcccaaattagatctgaagttgcatgaaaccattattagctttgaaagctttgatgtgtttttagtaataatcagatgatggtagtggtaaaaatgat

SEQ ID NO: 410 - DNA, 101 bp, Homo sapiens
  misc_feature (1)...(101): n = A,T,C or G
tgaatgctcattacgggcaaggggntaagttgacaccactccncccagnctgtgagtcacttngcaacacaaacacaggnttnctaggcctccctccccag

SEQ ID NO: 411 - DNA, 379 bp, Homo sapiens
  misc_feature (1)...(379): n = A,T,C or G
ttttgaggacgctccaaaaggttttgcgtgtncnnacggctgtanagaantcagggagagagaaaccagnggtcctagcttnaacatccgntaccntgctctgngctntggtncacactccaaccctggcaggaagacnaaccantgaaggagagagccgtgcacagcctgtcacctgcnaggnggggttaatccagcctctgctacagcattccagaacagggaagggacgcaaccactcccaacggtccactgtccattccccacttgaaagagcatctcctcactgtctagactctgtgactagagtcagccagagagctttgtcaaatcacaaaacaattacaacattcatgctttcttccctgaaaaaaaaaaa

SEQ ID NO: 412 - DNA, 311 bp, Homo sapiens
  misc_feature (1)...(311): n = A,T,C or G
gcaggctgggaagtctctntgactcacccatgtggtaggntgtgaaaggcggcngnnccgaagctgnntnaattnganngcggcatgctctgngtggganccnatgagaagcnttctgggacccgacgctggcttntnaccatctgcntgaagtaggccacttcttacagtnncctgaggggaaggaagcngntgtncgcagagctctccttncacaantgnannccangatgactgacctacattgtgggcctncaaaatgaccttcactgtagtcataggagttcaaaattaaaataaatcacaaacac

SEQ ID NO: 413 - DNA, 205 bp, Homo sapiens
taatgctcagtgtagcctcagctcatctttcctcaaaactcatctttcagaagcgtccgcggtagagatgagcgcagcggaactgatttagttcagtacagggagaggggtggggtagctccgtgtcttatacactctaggggacaaaacccacctagcatacgactagacacagtgggcaccaataaaaaaatatataaacaaa

SEQ ID NO: 414 - DNA, 300 bp, Homo sapiens
  misc_feature (1)...(300): n = A,T,C or G
gcatgcatgcatgcgggcattngcttgcagagnccagaagnggatgnctgatncccngaaactgnangaagctacangcacgtnnggaggtacctgctgngattgctgngaactgaacttgggttctctacnagaggaatnggtgtncttcacagcataantnctctntccagcccttaaaagccaaacgtttaagacaatgngatgattctgcctacatgagatgaatatatagcattcacttacaagnantgacagatcaaacaatatctttttagttccaataaagcacacaaaata

SEQ ID NO: 415 - DNA, 256 bp, Homo sapiens
  misc_feature (1)...(256): n = A,T,C or G
gggcggcggccgtccnnacttcttgtgnaactctcaaaggtcgntcaggnngcntggcatgtntccatatanaaactgcctagagcngatgnnttngngctcngtccctnnncattctgatcgtatnctatttcagcagtncctactctataggaantctacggaacgttctcgaccttgcaggcatgcatagcatgtgggggtcagacgtccgagaaggagtgagggctggatacaagggaggatcgaaaaaaaa

SEQ ID NO: 416 - DNA, 143 bp, Homo sapiens
gactgagaggctgtgtggacagggcctgcgcagcactccccgaaaactctctccactgacagaacaggagactcccgccaccttcctccttggtgccctgccctaccttacagtttttgaaatgaaattttaaaacaaaaaaa

SEQ ID NO: 417 - DNA, 221 bp, Homo sapiens
  misc_feature (1)...(221): n = A,T,C or G
atacatctgtggaacaggctgtggcntggagntcactaaganctcactgctcccgactncntggctttgggattaaaagtgtattcaaccacatccaggaccaaccatangaatntngcctgcaacgtacangacgtaacatgttgtcaaatnttggtgacaaacaggggcaaactnaacctgnttaaattcgcnataaaaggtggccctctcaaagccct

SEQ ID NO: 418 - DNA, 222 bp, Homo sapiens
tgcacgccagcgcacaggtgacccctgtttcacctgttacctcctctccatccttaatacacctcaagtcacttcctgacccgtcaggggtcagcccctactagaaggatcaaggcagaatggaggctggtccaggcctccgaagctgctgatttgacaggatactagctggtttccttccttcttgctgtattaaaactcactgctaggtaaaaaaaaaaa

SEQ ID NO: 419 - DNA, 326 bp, Homo sapiens
cacctacctttcaggaagccctcccccagatctcatctgggaaacaggctcaggaaggactaaaggatagtctcaggttctgcacggcccaagttttcaaaccagctcacagctcagctcttccttctggaagtctccagcaatgtttcagtctgcactttgagaagaggagcccttgttacctgccaccttctcacaccatcccctggggatgctcccaggaaacaggaacaactccctcccctctcccagggtaccatgcagggatgcacccaggctttcagaacttgactgaaaagaacgttttaggtctttctgtttaaagc

SEQ ID NO: 420 - DNA, 284 bp, Homo sapiens
cagggagcacggcccacggcagcaagcatggccttggctgagcagccaaaccctcttgttgctccagagcaaccatgactcctggcccttggcggcgcctctccagtgagatctaaccctgtaataccaattcggcccatctctgggaagccttctcacccacatccatgcctggagggtaaatattgtaatgacctagctggtgtccccagcctgctcagagctgggcagcccccatcattcaataaatggtaggttggggaaggggcagttcaaaaaaaaaa

SEQ ID NO: 421 - DNA, 331 bp, Homo sapiens
  misc_feature (1)...(331): n = A,T,C or G
actgagctggagaatgagacnaggnccacctcctccaggtcgaaaactgaaggaattgatcttggctagagacactggcaccacaggagcaacacccacgggagcacttaatagcgggaggcagctccttccccagccaagagcctgggcagggatcctggactagcacccagtaccggaagctgcctgcagcctccgctggagctttcggacagagctgtttctgaagaaagaagctggactgttgaggggggtggtggggtgacagccacaaatgaggctttttgtagtggatcgggcataaatacacatttagccaccaaaaaaaaaa

SEQ ID NO: 422 - DNA, 179 bp, Homo sapiens
  misc_feature (1)...(179): n = A,T,C or G
tgcgtgagcttttgtgcntntcacacatgcagtancccatgggagccagaagaaggtgccaggtccctnggnnctggagtnctangtnattgtgagccaccacgtgtncaccgggaacatgaaccnaggncgtttgcaagagcaataaaccatcttaaccgcggcgtcatctctccaaa

SEQ ID NO: 423 - DNA, 445 bp, Homo sapiens
  misc_feature (1)...(445): n = A,T,C or G
aaccgcctactgaatttaacagcaagcgccacgtggaacactggtcactttcgtctttgccacnatcaagggaagccatngctggtggactctcctttccacccaagggaaccaacagtgcaatatagcagaggncngncnnantgnncaagttgangccnacntgcanangggagacacaaaccnggacnggcacnggcgncanggacnnanngngtcngcnnanganagcgcacagaggctganggggagaancttaactggagagcgaagcccgaggagggagagctagtgcgcgagcagccctgtcttcttcactagatagcttaaacagtgagaaacactctcccagcctctnncttcaccngaagctnggactgccttccagagatgntggggnnncacaaagganactcactaactgngggcacttggacccccaaaa

SEQ ID NO: 424 - DNA, 225 bp, Homo sapiens
ctattggcctggctcccatggggccagagaagtcatttcgcgacgaagctatcaccatgatcaggcttttgcttcgttaagctattttgcctcttggacatgaagatggccctcagaatttccagtgtgctctatgccgttccctcaccttgtcgggatggcagggatgagagccaagcctactgagaagtttttgtttgtttgtttgtcttattgttgtttttg

SEQ ID NO: 425 - DNA, 140 bp, Homo sapiens
  misc_feature (1)...(140): n = A,T,C or G
tatttactgtgcttgtaattttgtncggtcatctatttacaacataaatataatgtttgtatatttacacatctgataaatattaaatcataacttggtaagaaaatcccaattaaaggctttcttcctaaaaaaaaaaa

SEQ ID NO: 426 - DNA, 374 bp, Homo sapiens
  misc_feature (1)...(374): n = A,T,C or G
ccactgcggctttttgcggntccnnctgtttctcagcagagacttatttttccagacaatgnaattccttcagtactctgcgtttcacaaacttgagggcttgagaaaagcgactaccttgctattcttgcggaggacccaagttcagttctcagcagccactccagcacctcagcagcaggagatcggctgtgttcctctgacctccttggtactaggtgtgtccatggtgcacagacatacaagcaggtatcagattgacaaagactgaaagaactttggaagttgctgtcatggtggaaaactcaagggctnatttacttcaggtttattgaaaatatggcataacagatnaaacagctccacgtggtgct

SEQ ID NO: 427 - DNA, 140 bp, Homo sapiens
  misc_feature (1)...(140): n = A,T,C or G
cgcgctgcaccgaggccatanttactncttgcggaactctcanagaanagancagagaagtgnggccagaccccatagcatgtncccatcatggncaagagacccaccagagccccgccgttacctgagggcccaggaag

SEQ ID NO: 428 - DNA, 360 bp, Homo sapiens
gactgagtatggattctggctgtgatgtctggagctatggcagccttcttggaaccatgcagagaaacctggaccacacgtcaagcagaggaagcaaaatcgagcaaaggactcggggcttggtgacaagtggaacctggaagcttctacttccagacttccggttcctgaagactctgttgaccattccatcctttgtgtccctgccctcctggggttctacagcttggtacccacttcccatgcctgagcctcagtttctctcctgaaaatatggtgaccatgacccacctcaggaagtagccaagaagttgggaaaagtcgaattaagggccaagtcgagttggccgtgaggaaaaa

SEQ ID NO: 429 - DNA, 287 bp, Homo sapiens
  misc_feature (1)...(287): n = A,T,C or G
gccgaccccgggaagnncacaaggngggnngaggggagaggcagaggggcaaggcgaggccgncancgacancagccagaccancgaccgggcggcccgcacaacccagaccaaggccacnaccggaggccagaggccgccagggagccaaggccgcgcgccganaaggcgcggnnacgggcncngagcgacgaaccgncgcggcagngaagacgacagcgcgacangacggnccgnggcnggnggcaagcngacgcggggggcnggaagggaaggggacccggggc

SEQ ID NO: 430 - DNA, 107 bp, Homo sapiens
  misc_feature (1)...(107): n = A,T,C or G
agagaaccatctctttgataactacatgnagcaggacgctcacgagttcttaaatccatntgctantcactattgccgnacatccngcacgaagagaagaaacagga

SEQ ID NO: 431 - DNA, 211 bp, Homo sapiens
  misc_feature (1)...(211): n = A,T,C or G
gactgagggttgaaggcagaagnagcacaagagttgcccctgacngnccaaggctatangatgttcctcctggcctaatgattatccctgacatcnattncagacngagccactagagcaagacactcagatgagagcntgatgcagttacatcatgagcaacagagcagacacataacgtattaaacacttcaactacaggaattataaa

SEQ ID NO: 432 - DNA, 363 bp, Homo sapiens
  misc_feature (1)...(363): n = A,T,C or G
tgcaccatggtagagtgnctcatgacccatactcttggagncaggtnnctgnagagccatntgccttcgttccaaggctggctcagatcaacatgtgccaagctctncaagtcctgctgnagctncagagactacacaaaccagagtncagncagcctacctgatncaagaaagaccacagagatctgagagagccacccaagactactggaacctacagcacactgtcacgaagagaactgatatctaccaagcctgaccagaatagaagaactatactcctgacccacagacacgcatagtgtaagacagtagttgtttaagccattaaaaaataggaggcaataaccccaaaaaaaaaaa

SEQ ID NO: 433 - DNA, 298 bp, Homo sapiens
  misc_feature (1)...(298): n = A,T,C or G
gtacactctaggcagngnatatacacncacacggnttccatctaagaggncgncagcccagaannggaaaccatggtccaacctgcacaatctccaagaacccacatnagggagaaatgattgatcatgcatgggntccgagtccagccacatttgtattggtgcatanagagacntggaatggttcttgcatcctctganaaactggggacaaatgccctacngactccaagaaatgatntatattttaccaccannaatatgtgcagtgatgatttaaggggcaaaaaaattaaaa

SEQ ID NO: 434 - DNA, 240 bp, Homo sapiens
  misc_feature (1)...(240): n = A,T,C or G
gattgagcctgctctcccagcttgttgaacctccagncacgaggaacagagccatctgaattgtttgcagcaatctggccagccccattgcaaaacatcctgatgatacccacccaggttcccatctgaaaggtttgagttttttccaagagaagctttaatagattaattagttcttcgagtctctcagggatttggcaaataaacaatgttgcgtttgtacagacaagagagaaagaa

SEQ ID NO: 435 - DNA, 328 bp, Homo sapiens
  misc_feature (1)...(328): n = A,T,C or G
gtactcatatacataaaanaaatctcttntnttgnttatgacttttngaannnaaagnctcaaaaaaaggctggcgattctgaatctcttcatgaatgtcagacttttctaactgctaactgcttacaagccatcaaaacttcacgctagcttttcccaacacaggagatgcagttgcagagctaacatcagtttgttttcttactaaacgtggatgggctgagatgggttggaacctttccgtgtccccacggggatctactttacttcctagtatgttggcgctaaacccgactgtgttaaaatagaaataaaccttgagatttca

SEQ ID NO: 436 - DNA, 186 bp, Homo sapiens
  misc_feature (1)...(186): n = A,T,C or G
atacctacagcccagcattctcctggaaccctggaattcccttcgctgctcatgctggcgtagaaacactgatagtcctctcacctcagcttcctcagtgctacaatataggcgtgagcttccgtgctaggccagaacttcttgtgctgaggatgnncctggatatcggacccaaggctttatgct

SEQ ID NO: 437 - DNA, 342 bp, Homo sapiens
  misc_feature (1)...(342): n = A,T,C or G
gatctgagtgcacgtcctggtcgatcaaggagacagtggggcatcttgcagggctggcggatggtcagcttgatttggagacgtttgtgatggggtatgaagaagagggcagtgagagattgagagggaaaacagaaagtgaggtgagtggtggacaggaggcatgattacgaggcctgggcctggaaggaggaagacaggaagagagaagggtggacagctgtgnngaaggccgacacctggnctgccctcgagccccaaggccagggaggacaggactgctccctgggaagaactggntctcagngttccccaggcactggccaaactggctgtgctagc

SEQ ID NO: 438 - DNA, 173 bp, Homo sapiens
  misc_feature (1)...(173): n = A,T,C or G
gactgaggctctaccgaatgggggaactcctttaccaacatgagctgaagctgtgctgngctcgtctgtgcccagggggctagggaagaagttagcgcccagctcacagttcacccacgttctattgatnccgtttctgncataaaacgtcgactcttctgtaaaaaaaaaaa

SEQ ID NO: 439 - DNA, 138 bp, Homo sapiens
  misc_feature (1)...(138): n = A,T,C or G
acacacagcatggcctncaaccctgctccanatggnctgaagaccttgtacnacagtggtgctaacctctatanggcnncacgtctgtgcttggancctgncatntntnatnagtgggaggcggaaagcataaccgac

SEQ ID NO: 440 - DNA, 360 bp, Homo sapiens
  misc_feature (1)...(360): n = A,T,C or G
aaggggacatcacgcgaggggntcctcctgactgcatgactgatccactatgaacggagctaccctggttaaatgggcctggctgcataagaaaggcagcctgancatgcgcgtgagaggtagtaaaccgcaccgctccacagcctctgagntctcccaggagctcctgcctgacttccctncctgacggattgtcanntgtgggcacaagccaactaagtcctctccttccccaagcagcctttagtnatggcacaacacganaganaggttcntagaacaaggttctaggaataancatggggngancattctactggacaatataaaatacatnctgattttttctaaaaaaaattt

SEQ ID NO: 441 - DNA, 146 bp, Homo sapiens
  misc_feature (1)...(146): n = A,T,C or G
gtgcacaacggaactgggcagnggnggtacatgcctttagcangcanaaggaggcaggtctccganttcaagtccagnctggtctacagaanaattccaggacagccaggaacttaacggntcangaaaccaaaaaaggaggagga

SEQ ID NO: 442 - DNA, 120 bp, Homo sapiens
  misc_feature (1)...(120): n = A,T,C or G
ggtatgaccttgaaactncagctctccagcttctctagtgtcaccggtgtacangnangactccactagcnngggntngcanaggaatttncaacgcccatgagatagaagtttcgacgg

SEQ ID NO: 443 - DNA, 164 bp, Homo sapiens
taaacgctgcctggaagagggtgacatccgtgtttgggacaccaattctggcaccaaaacttttctactcagaaactgagcgcccagacgcatttaggggagatgggaattgagtactttttactaatttaagcaaagatccttcccattcaaactaaaaaaaa

SEQ ID NO: 444 - DNA, 162 bp, Homo sapiens
  misc_feature (1)...(162): n = A,T,C or G
tctatgacttggtgaaganggaaaacagtnagaaaggctgaagnactgccatacnngnaagaggntgcaccgcgagcncangaagcatgtcacttacgccactaaactctncatgcncgcnggctnactacagnatntttatgagcttttggaggaagggct

SEQ ID NO: 445 - DNA, 196 bp, Homo sapiens
  misc_feature (1)...(196): n = A,T,C or G
gccaacattgaccggcaggatgaganaccgntcgtttggctaganaacntnntgaanctatnanngagatnctgggtnctggacagtgatgtgngctgcaatgnggatggaacgncancntgatganatcatagatgacatcaacagctggngcagtggagtgcccagcatagttaagaagcaacaagaaaatatt

SEQ ID NO: 446 - DNA, 138 bp, Homo sapiens
  misc_feature (1)...(138): n = A,T,C or G
ggaagctggtgcatctaaaggctgctttagtggtaccgtccctcgacatcacagcccccgaaagacccggaaaccaacaggatggaagtcacntacangaaaaacagaacaaatggtgcccttacacgaaaaaaaaaa

SEQ ID NO: 447 - DNA, 107 bp, Homo sapiens
ggacggggtcaaatagcctttgtaagctcacagggctcttcagctgtttcagtgtcatgtcaacaatggcagctcacattctaaaattaaaggattattttttacaa

SEQ ID NO: 448 - DNA, 104 bp, Homo sapiens
  misc_feature (1)...(104): n = A,T,C or G
tagcagtactgcttgccgtcatgctcccgctccatgctgacnatagactnatcttcagaagccgcgagctcccaattaaatgctttcttatgtaaaaaaaaaaa

SEQ ID NO: 449 - DNA, 119 bp, Homo sapiens
  misc_feature (1)...(119): n = A,T,C or G
tgattctcttgctgctgccgctgctgccgntgncatacaccactcttgattccttngcttgctacgcccactccagntgaagcccacttgacnggccaanangcctggaggcactcaca

SEQ ID NO: 450 - DNA, 187 bp, Homo sapiens
  misc_feature (1)...(187): n = A,T,C or G
cttttggggttggganggtggggggccaaaggaacggaaaangggngttttttccctttcttttnnttccccccccaaaaccggaacttnntgggccccttcttnggaacaattngggccaaaaaggncancggtggnttattggaaccaaaccttggggcccccantggggaccttgggggaaaag

SEQ ID NO: 451 - DNA, 144 bp, Homo sapiens
  misc_feature (1)...(144): n = A,T,C or G
tgatgcaaggccgcttccatatntatgaaggatactcactgtcaaaggagacgatttccagcngngagtnttccatcntctggctggggnacctttggacgntnaccaatgctgnttgnaggactgcaaccctaattttttaaa

SEQ ID NO: 452 - DNA, 109 bp, Homo sapiens
  misc_feature (1)...(109): n = A,T,C or G
ccggaccttcctgcgaacgacnctggagatgacagtatctatntgatngcctcnagtactgagaggaaaggacacnantctatggtgaggactgatggacatacattat

SEQ ID NO: 453 - DNA, 107 bp, Homo sapiens
  misc_feature (1)...(107): n = A,T,C or G
gtgtctggaggagaggngctcctgggaggaggcccgggagnactttgaggacaacacactgacngagcgcttttgggaaagctatacgtacaatggcaagggagggc

SEQ ID NO: 454 - DNA, 225 bp, Homo sapiens
  misc_feature (1)...(225): n = A,T,C or G
gcatgccagacgggacaagcccacntcnctcagacccagntnnagcctccngntncagcggatcccntagggcancgagaagacttcttcagcncctgccatcnaaccnggctacnatatagggtatcacctggaggttantgntgcatatatgtatgtgtgtgttaacaggaacagccccattttaccatttncttgtgttattgctacttatgaataaattag

SEQ ID NO: 455 - DNA, 317 bp, Homo sapiens
  misc_feature (1)...(317): n = A,T,C or G
tgaggcttcctcagcangtgccttgaccagncgagccacatcgcctgcttcttactgtgttttaagagtatcactacnctagacctccaacttgaagtgatccttctgcccctgcttctggagtgctgggatttgatgctattatacacatatctccagaaatccatctttaacaagttttgtgactctagtgcacatgcattcacacngtaagaatacatactatcagttgttctttgatctccatgcctgggcgcatgcacacacgcacgtgtacacacatacccattctaaataaatcaatgtaaaaaaaaaaa

SEQ ID NO: 456 - DNA, 152 bp, Homo sapiens
  misc_feature (1)...(152): n = A,T,C or G
accatatgaagcttcaaggactctaggaggttngncatgtcnttgnanancgagctctccatggaggcacagctggactagcctgcaattnantagagagaagngcttaggatgnaaagacnnccagngctgtctggttgcagcttgcagaa

SEQ ID NO: 457 - DNA, 138 bp, Homo sapiens
  misc_feature (1)...(138): n = A,T,C or G
gagtgcggatactgagagtcagagncaactnactcattgacaaaggnaggcttttaacctgtgaggcatangangaaccctaaggatanncagttgttagtggtggacgaacgcnngtgcctttacgacattggtgaa

SEQ ID NO: 458 - DNA, 274 bp, Homo sapiens
  misc_feature (1)...(274): n = A,T,C or G
atttggtttacgtgtgtgggcaaccatgagctgcagcgactgagctccgacctgcacactgtcantgcttccaagggaccctcatcagntacccnnaantccagctggntgnactctctgnatccctngagggccctgtgnactatgaccacagattgcagagagacagggccttgaagaagccagngtacttgnagtccaanagaaaccaggaanntttgaagccatggccccntcccatgctgntttccagccnctggatacatctttatct

SEQ ID NO: 459 - DNA, 172 bp, Homo sapiens
  misc_feature (1)...(172): n = A,T,C or G
taggaaagggatggcttcnatggttttttggtatcccagttcccctttgttcnaagncagggaagggcccattgggnacccntggtcttcgggngggaacccctttcngtggggntttttncttnggggccnagggntngggaaanacncaaanccccttttttgggggggg

SEQ ID NO: 460 - DNA, 388 bp, Homo sapiens
  misc_feature (1)...(388): n = A,T,C or G
accccacccatatcantgggcacagagganccactcgtcttnctgnntcaacttcaagtgganagaagtacatcccananatgcatnccctgtgtcttatccttgtgtcccagattgtttgactattgcatgagataaaccnttcgancgaaaccnacacanaggnctcctttcccatcggaacacattcacctggntttcagatgtcatccccagaanatgatagtggaagactagagatgaagtatctggaagagcttaatccagatgctttgntnatggtggcaagaanggcgaccgacgtgcgatccncgaccatttgaaaatgccggtgaaataaaccaccccaagtaaataaaaccatagacatcatccccaaaaaaaaaaa

SEQ ID NO: 461 - DNA, 227 bp, Homo sapiens
  misc_feature (1)...(227): n = A,T,C or G
actgaggtggggtctttcagaagtagtcggnagtaacgacgagcgcctgctgcccccagcgctgcccgggagacgcgtccggggcgggcccgctgcccgtcagctctgtccgtgggtncgtttgtnctccngcagcttctcaagtgaggggagggcggggcacttccgggcagggtntccagctgngnctgtcgcttcagagctttatccttagatcaaaaaaaaaa

SEQ ID NO: 462 - DNA, 214 bp, Homo sapiens
  misc_feature (1)...(214): n = A,T,C or G
aagagtctgacaccctgttgactacnctgcaactgctcagtacttgctgnctttttnagagatccaggaaccagttacccctggatgcacacggcgtgtgctgctcactcttttgaaaccacgtggctgccagtncctgccaggacaggatatatgcccttggnanaaacagacacaatcacaagcaaccccagcatccatgcaaaaaaaaaaa

SEQ ID NO: 463 - DNA, 362 bp, Homo sapiens
  misc_feature (1)...(362): n = A,T,C or G
ccaggcactgcaagacgcggngcancnnancnngatgacntcgnagccatatcnanccaggccaggcccggagatnccggncagncttctgctnccgntgtctgtaganncccnnggcctttacgagatttgctttcgatatttttacctatggagcgcatggatgatatganncattgaccattgantacgtgnaccatagaantcctgancncnngcacgagaaatacgcnaaaanacgatatgctacctgntgntgtagaataaacaaggcctttacantanttgctntcctatttttacctatggaaagcaggatttatgtctcattgaccatttactaagtaaaccatagtttctga

SEQ ID NO: 464 - DNA, 176 bp, Homo sapiens
  misc_feature (1)...(176): n = A,T,C or G
cagactttctcagaacccacagacccacctgnatggcgaagccccgggaagaagaagaggaagtgtacagtctnctgtgatggatnctgggtctgagaagacccctttcctcctgatgaagcctaattgttcacaccttccctgtggtgagaganaatgacttgggtttttggttt

SEQ ID NO: 465 - DNA, 125 bp, Homo sapiens
gatctgagtacatcaaagcacaggtgtcgaagtaagaaactacgtttcccagagtgcaatgcaggactgagttactgtaatcaatagtgaataaaagatgtcattgggccttatgaaaaaaaaaa

SEQ ID NO: 466 - DNA, 241 bp, Homo sapiens
  misc_feature (1)...(241): n = A,T,C or G
gagacccgctgcctannctgccnggagaaaattagtgaacanaagcatggtcgtccaaggactgcaagaagtanctaattaccttggaacagttgatgatttggncctgagaagtggactaacagtagagatacaacacacttagccatgctngatgcgcttcaaaaggngtgcngaagaaacatgctacgttctntatgaagcagagaaggcantaaantcttcaggactcagctaaaaa

SEQ ID NO: 467 - DNA, 150 bp, Homo sapiens
tgactgagcagtggagtatggataggagccaatgctactttctgaggggtgtgaaccttgctgtgggggtgtcattaagtgtattgtttaactataccattcagaagccaaccggaagctattgaccattaaaattatgagaatttcaaa

SEQ ID NO: 468 - DNA, 153 bp, Homo sapiens
  misc_feature (1)...(153): n = A,T,C or G
tgaggcccttctccgtgccctgnggcgtggaagcccttgccgnggaaagcaagaagcgtgaccatgttagagtacactgtgtccttgcagcaagcccgnganntgtgtcctggcctagcagggtgctctanacagttcttgcttgctgaggaa

SEQ ID NO: 469 - DNA, 213 bp, Homo sapiens
  misc_feature (1)...(213): n = A,T,C or G
cccctaggaactgcacatttcaaggagaattggcgaatccagaagggattgttttcctcagtctctcgcttgcgattacnttctgagtggcagcgttctgtggagtttccctctcctttggatatttttcttgatcatctagataataatcctaaactggttaataattgagaaagaaatataatacccatgactgcggtttaaaaaaaaaaa

SEQ ID NO: 470 - DNA, 148 bp, Homo sapiens
  misc_feature (1)...(148): n = A,T,C or G
cagacaggaaccggacggtagggagcctgcccngctcccctnagattgnattgtgaggtcggtgggagcnagtcatgtgcattgntccnaactgaacntaggtgctctgnaggagactcntaattcntgagtcatatctacaggctgg

SEQ ID NO: 471 - DNA, 121 bp, Homo sapiens
  misc_feature (1)...(121): n = A,T,C or G
gttacaatgtctgggccagnggcacggncaggnagagagagccgngcacgnngggaccattgtancgagtttnttgcttgcgcgaatgagaagataccagagatagggctgagggagaagg

SEQ ID NO: 472 - DNA, 324 bp, Homo sapiens
  misc_feature (1)...(324): n = A,T,C or G
gaactgagatagcaagggagagcacaccagnctccgagtccgttcagactgcgcacttcacagctgagacccagggcagccatttcggtctgacatggcggaaaaaccaactaacacgtcggtgccaatacctggcagtgaagatccagttgagtgcatcttttgtatatgatatatgcgttatgcacnttcaataagtagtttcaaaatgacttggctctaagttgattcaggtcctgacagctaaagaggcttgctatctttgggaacagatcatgaaccttactattggttagatttaaatgtaaatggtggtttaaacaa

SEQ ID NO: 473 - DNA, 287 bp, Homo sapiens
  misc_feature (1)...(287): n = A,T,C or G
ttattttttgtggttacaaagnaaaacaagttggccccagcagggcaaaagcaagcccaaagttttaaagatattcgcattttagtaataatataactatagtaataggttattataacctaaaataaattagtctcaaaatttggaagtcattttcatgtaggacagaggcctaacttcaggattctggtccaggaggcggcggtggtggtgaaaggaaagcttttgtggccnactntaaaagtcacaacctcctacgaggaanntaacgcttgtggatcggctgc

SEQ ID NO: 474 - DNA, 109 bp, Homo sapiens
  misc_feature (1)...(109): n = A,T,C or G
cccttttcggggtggccaggangatgacctagaacgatgtggtaagacgnncatacnncacggnggatctngaattctttnacccnttatgccagatgtcccaagtgtg

SEQ ID NO: 475 - DNA, 151 bp, Homo sapiens
  misc_feature (1)...(151): n = A,T,C or G
cagccgtgtcgctggaagacaggaacagcgtgacaagtntagaggagagaantgaggacgatgaanactgtggatgatgaagtcantttacacctgcagatcacatgtcaagcaggacttngagtntgtggcngacctgacaggaccaccg

SEQ ID NO: 476 - DNA, 316 bp, Homo sapiens
  misc_feature (1)...(316): n = A,T,C or G
ccgtcctctgacacgcacccntcacggtatggaaganccgcgcagtatctgtgagctcctcacactntgncaccctggannnggacctggnttgngnggngncanaacaggnctntgncctcactgccacccgaggcctgtgcggaactgctgcttccctctaaacactgggaatctgaancctgactnagtgnangnntcttgctttcttnctcagctctccanggccttcatcaaggatccagnggccntgnatacctagagctcagctgngccggcctcnctggaacccagcncanactgtcctatctgctca

SEQ ID NO: 477 - DNA, 111 bp, Homo sapiens
  misc_feature (1)...(111): n = A,T,C or G
tctggtgacgctccttagtagccatgcatgccgngatgctaggagatgatancntggcaggccatngntacttggnctttgggtgggatctgagggaggagggctcaggct

SEQ ID NO: 478 - DNA, 184 bp, Homo sapiens
tgccctccagtctttccatatgggggatgacgttcagcctttccagaccacagaagaacagtaaacaacggagtgctgcttggggcgtggtaagaacccacttcacacattcctagtaggtgacagtcagctaaaatgccctttacaaaaaacacaggtatgggttggggtgtatatttatttt

SEQ ID NO: 479 - DNA, 377 bp, Homo sapiens
  misc_feature (1)...(377): n = A,T,C or G
cgagcaaggacacaagctntcctgncttgaccctccntncacgcgctctcattccccatccggagattctnccacactctggatggcagagctgcttgcaggccgncancngcagagnnngattgccttcttggcctcggacttagaaagcatgtatttctctctttctcttatccatctccctcttcctggcagncgctgagagctccagatngcctgnctttttgtnntttgatngttntntccnnanaatttcatnagcacgggngtggagaccccctactaaanttcancagaaaaaaagggaanntgtggaaaaggatntgacanaacgntnncgcncatncgcccctacnatggccagcaggaagaggcag

SEQ ID NO: 480 - DNA, 113 bp, Homo sapiens
  misc_feature (1)...(113): n = A,T,C or G
ttttgaggttacctgataaccgnttntggagaganctcaagccatttccatcatacatatttcaacttagactgcttggagtgtgaataaatttgtccccaacagaaaaaaaa

SEQ ID NO: 481 - DNA, 105 bp, Homo sapiens
  misc_feature (1)...(105): n = A,T,C or G
tttcttctgtcctaagtcctgaagaactcaaggacttctggaaacaaccaaagatttttatagcattntgcccntgtaaaggatgntgaattccatttgcaaggg

SEQ ID NO: 482 - DNA, 387 bp, Homo sapiens
  misc_feature (1)...(387): n = A,T,C or G
ccctgagcctgtcattgaacactgagcctggcgctgaggagggcttccaaggatgatgagcgatgctgagcacttttcctgncacaccantcaccggtgaacactccatgctnaagaatnacctgtcatgatgaacctctgtgatnctggtaatncaacncagggccatggcgcacagctagacaagcactgtgagctgnnctctaatccaagcttagcttacaaaatacncggcggtgggngnctaaggnaaantacttcctanncagncccacatcnccncgcnctctttaccatcccttctnccctactatcncncagtgntctacncnggngccatntgcatcngggnancccctnntnacnagccnctttccgtccccactt

SEQ ID NO: 483 - DNA, 171 bp, Homo sapiens
  misc_feature (1)...(171): n = A,T,C or G
gactggacatgaagcncatgcactgtatcgggagcattcggagccctgggagtacnggcgagcatcgngaggccggagggccagaagctcaaggatactctggangaggactgtgtgcggtaacatanactctgtcatccccacgaacctgaagaggaagacacacaaggg

SEQ ID NO: 484 - DNA, 128 bp, Homo sapiens
  misc_feature (1)...(128): n = A,T,C or G
gtgagggcctcaaaggntgggttgnagtatatcgatgaaaacnaggaacgatacgncnaagaaattngnagaatgggcngnccanccagagcgggtncgnatggccggagaaaagaggagagatcaga

SEQ ID NO: 485 - DNA, 192 bp, Homo sapiens
  misc_feature (1)...(192): n = A,T,C or G
aaaacccggacccaccngagagaggcgncangccgaagcacaggaancacgaaaaggngagggggncggcccggaagagaacacacccgcaaggncacnggaggaagncaaagacgggncccnggnggacccaacgcangggggccgggcctgtacaacaaggggggagggncncccagcaagaacgacgac

SEQ ID NO: 486 - DNA, 149 bp, Homo sapiens
gactgagggtttacgaggtattcctgcctacctggaactcgctatgtaaaccagccttgcactcacagtggtccacttgcctctgccttgccctgtgtctcctgggtgccaatattaaaggtgtgagtcagcaggcccaaaaaaaaaaa

SEQ ID NO: 487 - DNA, 160 bp, Homo sapiens
taatccctgtagtccaaggatgtagtaagctgggtatcatttgggatttacattgaatatgtgtgtgtgtttctagctttttatataaagaagctcttctgtaacaagtaagtatttttcttgtatataattaaataccaaatatatggaaaaaaaaaaa

SEQ ID NO: 488 - DNA, 113 bp, Homo sapiens
  misc_feature (1)...(113): n = A,T,C or G
ggaaggctttcaagtagtgggacgatctggcccacttttnncaggggagtgccctantggtggaggccggggttcntgggaatgagaaagccncngcaaaaggtggtttttaa

SEQ ID NO: 489 - DNA, 398 bp, Homo sapiens
  misc_feature (1)...(398): n = A,T,C or G
gaacatgggaagatagtctgtccaaatgatccccgattccaagacagtagttcagaagaagaagatattgctgaagaagcagatcatagcaagccaagccctggagaagcggttcctgagaatgaggccattagatttttctttttctctgagaatgacgacagacattcgtggttctaaccttattctggagtggtatgggaggtagtattagcagaaattcttgggaagcccgaacaagtagtctccttttggaatgncggaaganacataaagaagccaaaaggaaggtgaaagcaaattaaccattgncagctttggttctggaattgaatgtgcngactgctcaccagcccttgaaagaacattaacccagaaaagcattcactgacaaagaa

SEQ ID NO: 490 - DNA, 141 bp, Homo sapiens
  misc_feature (1)...(141): n = A,T,C or G
cacgaggacttaatgcctgtagattantttnagacacaaantgngccagtggacttgtnantnancccnaccaggacctcccctactgcagcngttatncnccgnctgtccccatgacagcntccgcctccgcagcttttt

SEQ ID NO: 491 - DNA, 128 bp, Homo sapiens
  misc_feature (1)...(128): n = A,T,C or G
aggaagatggatttagtcaggagtatcttaggagngangaacntngaccccgcggatcttctgtgctgacnactnngactatncanaacnttantaggatctacaggaanaaaaatgtcccatctgat

SEQ ID NO: 492 - DNA, 490 bp, Homo sapiens
  misc_feature (1)...(490): n = A,T,C or G
atgtgaaattgtttttaagaattcaaactttgttcttcactggaccctgggagaaggacattttcaagaatgagtgagtntctggtaaatacaccacaggagctagattannagtnanggntgggnctnngcngntaangtgtntgattgttgcatgnattcagattcagtcntnntgnacctggcctggggacgtnattttccttccaganctctntttnttgagaatatgaaantaccatgngccngcattacncatgtgaacagagntantgtnccaccaaaaataacattgtcatatgaacactaagagacaataaacattattttaanaataataaactgagtcttggaaatattacatagngacgcaagaaaccatccangananagaangagaggcantgnnaagnctgaatgagtctcancnctgctgacccctcatancancatcactaaagaagantgcaaatacggtggctctggaaac

SEQ ID NO: 493 - DNA, 126 bp, Homo sapiens
  misc_feature (1)...(126): n = A,T,C or G
ttcagggggacaacggacggcagagaagaaggccacgccagaagaaattggggaggacgganancccgcagacacagggagngacacgacccaaggcgaccaanggncccaagaacaggccgccac

SEQ ID NO: 494 - DNA, 292 bp, Homo sapiens
  misc_feature (1)...(292): n = A,T,C or G
gtaactgaatgctttgctttcagnactaagaannacagtattggaaattgaangaaactggcctgtttatgctgcttttgattctnacttcaaagatattgaacatttagtagagagaaanacaggtggtggattgggcttgaccaaactaatgaacattcaanccgaactgatcttncagggatttctcttcttatgaccttcccacagcttgaaccaattnagtctatttcttgttgcacatctgtgagtgatcctaacgtgcttanacttactccacaacgaagaacca

SEQ ID NO: 495 - DNA, 121 bp, Homo sapiens
  misc_feature (1)...(121): n = A,T,C or G
cctccagtgggtagcagggagagaccngcccctccctgttcattagtgcnaaagaaggaaagcagatgtttgaagaaaaacaaatgaagagtggggctgcaccagcaatgtgaaacaacat

SEQ ID NO: 496 - DNA, 206 bp, Homo sapiens
  misc_feature (1)...(206): n = A,T,C or G
gagactgaggaagacccgggaaactccagggtcacagtgagctgtggccatgtgagcataggtaancaccgntgcgagcncccaggcggntgnggggaggctnnaggcntgaatcaccacaggatcaacttgncatntatcatccaggttacctttggnaaactnggcnnnaggcnccagagngtcctgcccaacatgtcaaccta

SEQ ID NO: 497 - DNA, 155 bp, Homo sapiens
  misc_feature (1)...(155): n = A,T,C or G
gggacctggagatcgattcttcacttgtttattagtggatgccantgttacatctcttgatggacagaggctcacattctggaagaacagagtgttaaggatggcaatgaatacctgtttagataggaagagaagagaagagaagagaagagaac

SEQ ID NO: 498 - DNA, 218 bp, Homo sapiens
  misc_feature (1)...(218): n = A,T,C or G
gactgaggtggggtctttncttgaagtaaaaatggagttgctgttggatctatgccagcttcccacaccgccgattgcctgacactcaaaatccatctcagtgcatctctactgaacctgaaaagaaaaaggttgaccctggaatataaagaaccttgggatttaaaaagaagaggaagaggaggaggagntgtnaggttgnatgaccgcccccgcct

SEQ ID NO: 499 - DNA, 106 bp, Homo sapiens
  misc_feature (1)...(106): n = A,T,C or G
ggggaaaccaggccgaaacaagcanagnagnagggagccagaggagcacancnaggaannacggcaagggaaggcccangaggagaaggaggagagagacgagagc

SEQ ID NO: 500 - DNA, 124 bp, Homo sapiens
  misc_feature (1)...(124): n = A,T,C or G
ttgacccactggctgccaagatacangaagccttncaggntanaacncaggacatgtgagccactgncagtacccaanaattacacgaaccaacgtgggaacctagggaaagggagaggacatt

SEQ ID NO: 501 - DNA, 118 bp, Homo sapiens
  misc_feature (1)...(118): n = A,T,C or G
ctgaggggtagtgacatttagggatgtggctggtgacttntatcaggaggagagngcctgtntggatgctatttagaaggnnttatacaggaacataatgtgtggagacctacagtag

SEQ ID NO: 502 - DNA, 194 bp, Homo sapiens
  misc_feature (1)...(194): n = A,T,C or G
tgagagtcttgattggagttggttagcagcaatgactcgacactcgttcactgtcctggagcctacgaagctgttttgtcatttactccaaagtcatctttacttgctgaagccattcctcacttaccagtccgtgaggagatggctgcgatcgnaaactacganngactttacaagcacagtagcttggtgtt

SEQ ID NO: 503 - DNA, 344 bp, Homo sapiens
  misc_feature (1)...(344): n = A,T,C or G
gtcctgattcatgcctttgtgnttgacgngggccnaatggtngatagacnaannnctgtnagtagnntcaaccttantnngcagngacattatctcgtgnctggagaggaggncnttaatctcnnagnntagttcnctggtnnacantacanggatcctncagcagaaatangggcatgctcccattcacagggtgtcctgttacatgaaacttgggaggacccaaggaccatgcttggatactatgtgnctgctactggatggcaaagccttattgcctgaggntcctacatctatagcctanntttttaggnagcatccttggctctgaatcctgtaggcca

SEQ ID NO: 504 - DNA, 198 bp, Homo sapiens
  misc_feature (1)...(198): n = A,T,C or G
gtgacaggacattctgcnggcttnttaccaaagactggctnctcccttnctacagacaggcgnctgctgaagggactngagggnccntncaactcttcctttnctgntggcaacacacaggcaggcctgntcaaccccaggcccaacagaccagagagggaaaaaaaatagactgaggaagaagttcctgacgcatag

SEQ ID NO: 505 - DNA, 122 bp, Homo sapiens
  misc_feature (1)...(122): n = A,T,C or G
tgcttacagaggcgcngaatcgaatncagttnagatacaancaggcccaactcgaggagctggangatgagatcctggacgatgatcagnacacacgngcaaaccgcggcaaaaaacaagac

SEQ ID NO: 506 - DNA, 207 bp, Homo sapiens
  misc_feature (1)...(207): n = A,T,C or G
taagtagacgtcccagagccgacaatgggaatttcttcttctacctgggccttgagtgaaaactgtactgtttttcactgaaggccccagagggaaggagttganagcctcacaanntttttctgtgnncatctcatttcantttacgagnnaangaccncttncnccctntgtcccctcccacncntctgccccccgtacactgcc

SEQ ID NO: 507 - DNA, 146 bp, Homo sapiens
  misc_feature (1)...(146): n = A,T,C or G
ctggaccacagatcaccccttnttactatacaacttcagatgccgtnattnctacagagactgtattcatcgngnagatttnactganctgcaagancagggnncagaacatggttctttatgccgacgttagtggaaaacaatct

SEQ ID NO: 508 - DNA, 227 bp, Homo sapiens
  misc_feature (1)...(227): n = A,T,C or G
gactgagaatttctggttataaaaaagcntgtgactctcagacttatcctgaatgggaagtatgagttcagatgtccctctgctaaatgattacaaacaggacttcctgctgaagcgctttccacagactgttcttggaggccctcgactcaaactaggctactgtgcccctccttacatatatgttaatcagattgtccttttcctgatgccatgggccttaggtg

SEQ ID NO: 509 - DNA, 325 bp, Homo sapiens
  misc_feature (1)...(325): n = A,T,C or G
actgagcttgtcatcaatgttgacttcccaaatggctgagctgaagaagaataggacaaaaacttctaccagccaggggaaggaaagagagagggagggagattcagttcagtcctgaagagagggcgtcaagaaagcaccatgagaaaaaaacacctgaagcccaaagagtcagatcaatagtaatataaaggagtgcntggaaagaatactttatttgaagaggataaatacactgaagatgctacaggggaaaaataataccagcatggtattgcttaaaacagccataaaataaaacatctttcaattgcaaaaaaaaaaa

SEQ ID NO: 510 - DNA, 288 bp, Homo sapiens
  misc_feature (1)...(288): n = A,T,C or G
cgatgctgccctatagcttaggaacctaacccgaccgaagcaatgcanctgcccaaattngtgtgagaccgagcacattcaggcgtgcacattncaagcggngaacaaacagngatggagaacaaaggtccnngaaacaacgcctcaggacangatggcgaccgcagnaagtcgnggnctccgnngacaacgcccacgcncctgccagtgagcgcgctgagctngcgcccccggcactcgcncgcaaattcgcgtgcactggancatccaataaacgctacagttaaa

SEQ ID NO: 511 - DNA, 469 bp, Homo sapiens
  misc_feature (1)...(469): n = A,T,C or G
aactgagttgagcatcatgaaagacnagccagaagcggccgagctgattttgcatgacgctcttcgccttgcgtatgagagtgacaacaggaaggccatcacgtacacttatgacctgntggncnacttagcatttntacnanggcngcnttganaatgcagnacagctntttnaagcaccanangagntatctgattggaggaggcatgaagcaggaanacaatgcnataantgaaatctntntganactgnccancatctatgctgctcacaataaacaggantttgcccttgctggctatgaattctgcatttcaacnntagaggggaaaattgaaagaganaaggaattagcagaanatattatgtncgnaganncnggcanntncntacctcctacttggaacngcgcttagantcnngagcacgctatctgcnattcnccaagcagctatcacaggcacaccg

SEQ ID NO: 512 - DNA, 514 bp, Homo sapiens
  misc_feature (1)...(514): n = A,T,C or G
actgaggcccggcacagaggaagagttcctgcggcagttggccggcttgctgcgggcgttgcactgcccggatcgcgcgctctgcggcggagactgcgccaccgtgctgcgggagcccggcggcggcctgcgtctgctgcggtttntttgctctgagctccaggctgnccgnctcttgcatntaangctncagcgnnattctagccctgtgccatcctttggagaagggacaaagaaggcnaatggngntgttcaggaactgacgctaactcttnaagccctggggctccccanacccctgcgtggaaccctggctagccagntacttcgggagtnnnatgacaagatctntganctgntgccgnncctgcccccggagnccatgaagcccctccttaactcncanctggatgcatcccgatgggaagccctngagtctttgtcccaaagcctgacagaacannantggtnncgcngttgnctnctcctgaagcgccttgacctcacaacatct

SEQ ID NO: 513 - DNA, 160 bp, Homo sapiens
  misc_feature (1)...(160): n = A,T,C or G
cctactggagttttttgtgcttcnaccggagaagagttctgtagactgagcccaggccttttggagncctgtgnactcctgacctacatcccaggacatctcagccatttttcttttttctttctaaaaagaaaatggagggactggaggaaaaaaaaaa

SEQ ID NO: 514 - DNA, 247 bp, Homo sapiens
  misc_feature (1)...(247): n = A,T,C or G
ctttttttttttacccgctgtttaaaactggaaataagcggnatactggaagaagatgacatgttctnantgctnncagaagaaancccaaagcncctnggagaggagcttcaacggaacatgggatanagaacnttctgcngagccaagtaaggactnngaggaagccctccttaacaaaggcaatcataaagcgttantggaagncttacctgactatgggaattnttacgcttaattgaggagg

SEQ ID NO: 515 - DNA, 204 bp, Homo sapiens
  misc_feature (1)...(204): n = A,T,C or G
atggtggcccaggagcccaggaagctatgacagggacctgcctggaagaaaacctgcctgctgatgctcaaaacaagaaacctgctgtcacatacagaatctcagtgtgatttgccagtgaatatgcatgagaagctaatttgcaagaattcagtgaaaantaagntnttttgagngggtggaganaataatcatttcttgtgt

SEQ ID NO: 516 - DNA, 210 bp, Homo sapiens
  misc_feature (1)...(210): n = A,T,C or G
ttttgaggacgtgctgcttcgtttcatcggaaaacattctttgcacagtggccaacagtcattacagagnctcacactgatccagncnncctgatcgggtaggangnagaangtncnatgnnacgnnnctgatatntgttcntgncctgtgtgacaggtnacctcttttacaaagccatnaaggatctcttcctgctggaaaaaaaaaaa

SEQ ID NO: 517 - DNA, 142 bp, Homo sapiens
  misc_feature (1)...(142): n = A,T,C or G
gggggggggagggggggcacccnccccccnatttaanaagaattnttcggggacnacaacccccggaaattttgggggggnaaaacccggnngcgcgggncnacgangagaaaaancnccccccgtttttagggggggggag

SEQ ID NO: 518 - DNA, 104 bp, Homo sapiens
  misc_feature (1)...(104): n = A,T,C or G
ctggtgtacttccggntttgcagcaaggacgcgcttccggggccgaggccagncctaattcccacgcccagctggccccgccccggaagtagctgtctcccttg

SEQ ID NO: 519 - DNA, 221 bp, Homo sapiens
aactgaggtgagcaacaagcaagagaaatggcatctacgcacagtagcaagaagacagtgcccgttgtaggcactaccaccacattctggagatgctaggtgtggattcaggatccagaaaagatgcctacccatcaggttgcatttacctgcgattcttcacctggacactaggaggcagatattaaacttctgagtctggaccagcctaaaaaaaaaaa

SEQ ID NO: 520 - DNA, 116 bp, Homo sapiens
  misc_feature (1)...(116): n = A,T,C or G
tacatggtcacattgagctgnngnacagcatccatgcgagcaccagnaganagatctagcctctctcctgctttccttgtctacantgaactgngntaggaagggagaaaagacag

SEQ ID NO: 521 - DNA, 215 bp, Homo sapiens
cggggtgatccactggacactacgcttagtgcccaagacgtgaagacatcagagacaggtgccggggctgtctgtgtctgatgctatcgaacacctctctgggccaggggcaccaccctgagaacactctgtgacttctgtgagcttctggcttctgttcagcctgataattctgccccggtgaccaggcaggtgttacaacttgctctccctta

SEQ ID NO: 522 - DNA, 169 bp, Homo sapiens
  misc_feature (1)...(169): n = A,T,C or G
tccgtctgcagcccacntatccttgaacttttggcagtcctgcctcatcctgccaagtgcaaggcactattatttcagaagtattgaaggcagncctagatggctntggncngnnnattacangtngcttngncgttatnctagaaagnaagtataccgagcctgaggt

SEQ ID NO: 523 - DNA, 347 bp, Homo sapiens
  misc_feature (1)...(347): n = A,T,C or G
gcttgcttccatcgtgnctgaccnacctgaaccaaggagccagagnaagccgttacggnnnnnnnncgctnanctncacatggnanccngggtcnnttgcccagaggcccactctgactgtgcnnactnccnncntcccatgacccaaccnaaactcctntgaggatgctgagaacgacagcaagtaagggatggctgctggtgaatcatcaggtgtggaaaatgcattccagagagaagacgntagcangtggaaacctgcaggccctggcatctagacagaaagctatgctgctctgagcanngnaagtacagcnnatggttaactacggccctacccaggccca

SEQ ID NO: 524 - DNA, 355 bp, Homo sapiens
  misc_feature (1)...(355): n = A,T,C or G
tgccagtccacccaaaggcttgtgnctgatttccagagttctncgccaggagcactctttgatctgtgagtcactgttactggnncaagctgggaaaagttgagccccagtgatagcatcaatcagatggcagcgtggagattccaagacccaaggacccatggttgctgcaagaggaagaagacacatagatggcctctctccaggcctggccggctcatgctgcgacctctggtaaaaagacaggtcctctctcccaagataggacctgttcatggattttgcnggagcagnaaaactggcctaaaactccacatgcttttttttttaaanaaattaaataaataaacaaaaa

SEQ ID NO: 525 - DNA, 143 bp, Homo sapiens
  misc_feature (1)...(143): n = A,T,C or G
caaaccatccccagtgtggggtcatcaccgcttttcattcagcgncagaacaantgaaantatgatcntctgcagggaaanggtatggaactaaggancantgannncaacaaggaagacangcangcaaacaaacgtgactt

SEQ ID NO: 526 - DNA, 123 bp, Homo sapiens
  misc_feature (1)...(123): n = A,T,C or G
actaatacagaagcccagcctgaaacaactggctctcgtgggaccgagcanctnctaaattntnagggctgncccatnnacagctgaccattgcngaggagatggactctagcctgtaagaca

SEQ ID NO: 527 - DNA, 230 bp, Homo sapiens
  misc_feature (1)...(230): n = A,T,C or G
taactactgagctgctcagacacaaaggcctctaattaccagcctcgagccaagccgacagagatttcaagngttttcatgtttatggagatcagagaaatgngttctgttcatctttcgcactggagcncgctgccntngancctgagagcatgcaccgnggacactgngntccccgcttggccaggagagtctgcgtggaattgcagcgaccaggttgaatcacgcca

SEQ ID NO: 528 - DNA, 242 bp, Homo sapiens
tgtgctccgttcctgccattgagaacgctgctgcggacccaccgtgaccctcctcaacagatgagctgtcctcagatgcatcttgtccctgatttatcgtcttcgttgagaggcagagacctgaactctgtgcagttacattgtgggttcttgttgatccacttaccctggtaccatctccaggcagacagacggacccaaagttaaccttgattcaacatttgagcacagaaaaatgcacc

SEQ ID NO: 529 - DNA, 127 bp, Homo sapiens
  misc_feature (1)...(127): n = A,T,C or G
gttttttgggtcgaggagttcaggcagaangcgttcactttcagtcttttccttgtatctctcacgatgctgnatgacttgacctcataatctggtgtctggntaagtataaaactattctttactt

SEQ ID NO: 530 - DNA, 162 bp, Homo sapiens
  misc_feature (1)...(162): n = A,T,C or G
gtgcatcccaatctggagatcctgcctanngaggctgncnanngaggaccactgctaggcgtttattgagaagacagaaaagcaaaaagaggaggagaaggaggggactaggaagaggtgcctcatcagttaaagcccaaagcnagtacgtcattttctgaa

SEQ ID NO: 531 - DNA, 197 bp, Homo sapiens
cgaaaaatcctcttttttatattgggcaggagggtctacaacacaatatccttctttagacagaactatgaaaacctgtcaaagaagaggaggaagaagaggaggatgagaaagaggaggaagaggaacttaatttaaaaataggtgaattatctgaagagatatccaatgaagagatatagtcaaaaagcaaaaaa

SEQ ID NO: 532 - DNA, 259 bp, Homo sapiens
  misc_feature (1)...(259): n = A,T,C or G
ttggatgttaaagctgacgtttagctgtgagcagcgtttcctgcgcaagtcagagctggacagggaggctgaggagcactgcaggcagctcacagagtgtgaccgactttgagtacaccngtggacagcttgggctccatctcgaaggccaaagagaggaccacagattttgtcaagaagacaagcaggccaaagaataagaagnggatggancacctgnaggtgcngaaaagagccctgnacaggcggctggtcggca

SEQ ID NO: 533 - DNA, 175 bp, Homo sapiens
agcacctctcacagtctggatttcatgacctgcttcaggggaaggtctgagaattctctcaaggctcgcctggaggacggggagaagcctggaggacggggagaagcctggaggacggggagaagcctggaggacggggagaagcctggaggacggggagaagcctggaggatgg

SEQ ID NO: 534 - DNA, 102 bp, Homo sapiens
  misc_feature (1)...(102): n = A,T,C or G
ctgcctgtctgctgtctgcatgtntacttacttgncctgtcantcggnctgnacattgacctcatgaagangaaaggtgacatgnggatggtagccatcttg

SEQ ID NO: 535 - DNA, 339 bp, Homo sapiens
  misc_feature (1)...(339): n = A,T,C or G
gggctggcatctaggagtatccatcaccatcgtagatgccagaactccagcgacacatccatcagatggagcggttgaccttgtggataagtgtgtatcaaaaataagngctgcacagcaaaggccgtngatcccgcgtgtggagctcacccagtcaggaggacttttttacttggtgtgatcagggacagattgcccaaggcaagccgacanctgaacctgatacactaaagngcaccgaanaatccatccagccncgagttnaaagatatgtcgagggtgngaatgcctntaacttggcaagcaccttgctcaanaaganttttctatcgagtctaa

SEQ ID NO: 536 - DNA, 150 bp, Homo sapiens
  misc_feature (1)...(150): n = A,T,C or G
aagaaagcaggccgacaagccaggagggagcaaaccagcagcagcattccttnatggcttcagccatggagttccggccttgantgcccactctaacttccctcatgctggactattactgaaataaaccctnccttccctccttaaaaa

SEQ ID NO: 537 - DNA, 215 bp, Homo sapiens
  misc_feature (1)...(215): n = A,T,C or G
gtctttaggaggacgatttctctgcggggactggcggcggcgtacacgcccgggtcggncgctgcagagcttggctagctttcaacccgcgctcggcggctccagccccgcgcacccccgcccccagccctgccggaggccccgcaggtgagtgggagctgggagccaaaaaagagctaaatgtcngaaaaacatctgccttggaaaaaaaaaaa

SEQ ID NO: 538 - DNA, 489 bp, Homo sapiens
  misc_feature (1)...(489): n = A,T,C or G
aaatcatcattgcccacatgccacagctgntcaananattacagcaagccngtggacgtccccanngcgttttcctgaacaggtgcataggtctcatgatcctgacngtggtgtctcagcttccagtttcccgttgctgaggtaaaacgcgtgtaagaaagagcgggtatgtacngttcgagtcgataaacaagcagactggatcaggaagctggggttgttgcaaaggaatctcctggcacctagcaggaagtccctctatgactcctggagtaagggaacctgcataccagaaccacctaccccgggagtgcagaaggaaaaagatggaaccccgcccccctacatatctgtctgtttttcttaagcctcaccctacctggctctgtcaccctcaatttctctcatctctccttctctcccctgcttccagncggcagaggcgtgggtgtatccggaccaggctgtncccttggccctggtttctgg

SEQ ID NO: 539 - DNA, 121 bp, Homo sapiens
  misc_feature (1)...(121): n = A,T,C or G
gccacctttatcatatcctatcancancatacttacgatnagtaggtccggtggcattnancatcaccatcngcatcnntgntangacnaccaccgncaccattcttatcaacgtgagagc

SEQ ID NO: 540 - DNA, 311 bp, Homo sapiens
  misc_feature (1)...(311): n = A,T,C or G
actgagatttccaggctttccgcaccaaagcaggactacaaagagagagacgtggcttcagagtggagacggaattaagtttaaggctggacnggaagcctcctttgttcagacctcttggaggctaaggtagaagatgctgagatgttcagtagttgtcacgttgccagtagacctccctgaattaaggacaggagcatcacatgaaccagttatgggtttgacttatggctgacaagtagactatgttctatgtgtgaatagttgacaatgctttctgtgaattttaaaaccagaatttaaaatgaaca

SEQ ID NO: 541 - DNA, 150 bp, Homo sapiens
  misc_feature (1)...(150): n = A,T,C or G
ttgaggggatgtggtaagaccagctggggctggcccggtncatctgttntngggaggagaaagctagctccccaaggccaaagngcnttnagtagctnaggagaatcaanngcctactgattaaacttccagaagatcgcttttacccaa

SEQ ID NO: 542 - DNA, 290 bp, Homo sapiens
  misc_feature (1)...(290): n = A,T,C or G
acttccctagatcccctggaggtacagatgggccttggtcttctgcaaaatcagaatttggtcatnctgtcagcctgtgtttgtgaagtctggagttagtgtaccgaggngaccatgtcctcaggagaagcggctcattctctcctggtttctgtccccagcattccagtaagcaaggtgacaagtatggcaaatgtctgttgcattttctctcgcatgggttcacaggcaaangtggatgtatttataccatccttataaatactctacgaagcaaggagaaacaatgc

SEQ ID NO: 543 - DNA, 217 bp, Homo sapiens
gcttcacgtccaagatgtccaaaactgacatgcctcctctcccgacttggaacgtttctgaggctgatgatctgcaaaagggaactgcacctgacaaatgaccaaccaggaactccctaggaaaggcttttacttttaaggcagtactcaagcacacacatagattttctgttctaaagaaagatgtaataaaacgcttgaacctcaaaaaaaaaaa

SEQ ID NO: 544 - DNA, 350 bp, Homo sapiens
  misc_feature (1)...(350): n = A,T,C or G
tggattgaataagggaagagacagcttgcagtgtcagtcttctgcactgctccgtgggattaaaggaggcaatgacatctgttcctgatctctgtgcatgggagctggggagaggtgtcagccaaggagagcagcttactgaaacatatccacgggatgagaaaaacctaccagcnttctttacatcatctacaccctttccctcccaaccccatcaacggntgtttttgcaagctacatgttgtccctgaactttctattccattgtttaatctgtcaaactaggaagtttaaagtttatgaaaggactgtgtnatttacacccataatttgncatctctaggagcaac

SEQ ID NO: 545 - DNA, 179 bp, Homo sapiens
  misc_feature (1)...(179): n = A,T,C or G
attttcgcggaacgctacctgcctgntttgngcacaaaaancaagagtgcaaagaaagactntgaaatgaattnngatganganattgnttntgangcatattatcagaaatcaaaggctgctaccattntgaccaagnccacatttgnagaaccacaaattggaaagccaccacttct

SEQ ID NO: 546 - DNA, 190 bp, Homo sapiens
  misc_feature (1)...(190): n = A,T,C or G
cagccgagtcacgtggngccagaggcggccacgnagagccatntaccgacantacagcaagntctttgacctccagangcnnangtgtggacaagagtnanccatganaaggaggacagaaggagcccaggcagaggannatgtccatttngtgccaggcaaaatngctnttccgccgcagccacatgcg

SEQ ID NO: 547 - DNA, 336 bp, Homo sapiens
  misc_feature (1)...(336): n = A,T,C or G
tcccatctgctgtcctgcggcacccaggttaaccttaccagtggggctcanagcactgttatctcagctaagaagagcatagatgaagaagcgtgcccatgcctgagagagccacagagggcccctccccaagatgtccactcagctcagagaggattgaaccaggcaggagccgaggtgaccttaganattcattattcccttcctgttccatcagancagatttacnaagttaanattgggnttttctgtgatgcgcatacaactnggagaaagaagaacatacggnttcctgccttctactgcancangacacattgaacatgcaaatgaata

SEQ ID NO: 548 - DNA, 197 bp, Homo sapiens
  misc_feature (1)...(197): n = A,T,C or G
atttcagggcattcccacatnaaagcaaaagctgcangttagatggntaacaantttgagttttaagaattaggcattgcanaaattaaatgcttagaggagatgatcattttcttgtgtttaaagatataatagnngacaacgcttagatagaatcttgtaaggcatactcanaaanagaatgaaaataaaaaaga

SEQ ID NO: 549 - DNA, 116 bp, Homo sapiens
  misc_feature (1)...(116): n = A,T,C or G
gcacactgctggaacacngaggagccanacactgtgcacntttctantggaccangagattatnnaggagggnaatcgggggccctnccccttcnttnataactggtgtctcaaca

SEQ ID NO: 550 - DNA, 233 bp, Homo sapiens
  misc_feature (1)...(233): n = A,T,C or G
cctaaaagtaccaccacttggcngcacaggnattggatggtntgcancttttgatcccatcgcccttggnagcaggaggctcagttggaagcctcgtgaatancagangnccagcacatgatcctacagaagtgaantccatgcacagcacagngcntncncagtagaaactntnntctcaggcaacntacatcaacaancaacanagaactgancttggccatgatgataag

SEQ ID NO: 551 - DNA, 183 bp, Homo sapiens
  misc_feature (1)...(183): n = A,T,C or G
cccacaaccaaaaggaataaccttctacctnntccctctnccctggcnccttttgtgttnacattnaaacatcatttgcaccttttncaaggtaaaaaaataagtattcgnnnaacaaatngntgacatgtctcatttatgcttntttctagcntgtatnactttttaaaataaaggtagtat

SEQ ID NO: 552 - DNA, 146 bp, Homo sapiens
cagcacaaaagccatttactgcttcgttgttggtttacatatttctgaaaaggcgactggtgtaacctgtggaatttgaaatgcaaataaaagcctgtgggagttgaggcagaacaaatcggcacttataaagtgaaaaaaaaaaa

SEQ ID NO: 553 - DNA, 148 bp, Homo sapiens
  misc_feature (1)...(148): n = A,T,C or G
gtggataacagcttagcgctcggnctacaagaactccagtggttttgtgatcgatgcattgncagtaatcaggttgaagctcttgagaagttggtagagctgactgagaagctgtttgagtgtgacagnnaccatatgtactacaagt

SEQ ID NO: 554 - DNA, 154 bp, Homo sapiens
  misc_feature (1)...(154): n = A,T,C or G
atacttttacagtgtgtnatgaatgtggaacagaagcagttgcgnttaaaaggaagtaaaagaccaccaaagctaaactacattttttagggcacaccattctgcatagaggaaacgtacccttgtgagtttttcttttatttcttcagaaatt

SEQ ID NO: 555 - DNA, 443 bp, Homo sapiens
  misc_feature (1)...(443): n = A,T,C or G
gtgcctggcatacaaagatgaaaaaccagtagaacgtctgtggactgaacaaaccgagaaatgcaaacacagtgaaaatatttgaanggnaaaaagattttccaagcttataaaatgnctctaattggtgtcatcccagagacgaggaaggcaccttaagtcaatnctaaagatgaaatcttaaaggacaaacacgctgaanaggagaaccgnnnngaagacgntcattgcaangagagaggatgctggcgctggcgcctccgttaggagagtggacngggntttcgtggactctgtggctgttnagngnntggtgtccggnctccacactgcgngtgtcttgctcctacgctgtgnnancgtggnacactctcattntttgtcaccnttttctcgttctttcctgctgtcanngatagttaaatnccttgaccgcaactaga

SEQ ID NO: 556 - DNA, 122 bp, Homo sapiens
  misc_feature (1)...(122): n = A,T,C or G
tttgggtaaaccaggtcaggtgatagcagggaanncgcgatgacgtntaaatgcccataaatagtttggnntgctctnctgaaggggnngaatcgagccgntgaagactgctgacgtgggcg

SEQ ID NO: 557 - DNA, 524 bp, Homo sapiens
  misc_feature (1)...(524): n = A,T,C or G
gcccccggattttcggcgnaccaacnagnccnggaaaggggggccgaacagccagcgngtgagccngggaaaccanagcactcggaaggcccngggccagcnggccaagnacccagacccngcaatgggacagcnagcgcaangagagcacgcgnggacggaagcagaccatacancacagggaacnggggccctnccccagcacggcaggaaccaggccgggcactngacggcggcccctgacngagaccatcaccgaggcgaaagagctcggcgccnnccgggacaagagggacancacccacgagccaacgaaagnggnncngaagacncacgcnggagccaaggaccnnggccgcccancggacgcncnccagagangancggacagcccngaccnnnagataccccacacacagcnanaacaccangccccgaaggcaggaagncacccggcangcaaacaaacccnnggggacccgngcacnaagancccagaaacagcnaagccaacacccaacaga

SEQ ID NO: 558 - DNA, 122 bp, Homo sapiens
  misc_feature (1)...(122): n = A,T,C or G
caaccccaggctgtcaagcgtggcgcaancgttnnactgtntattgtatgagacgtcagtgtaacnacncaacggagcccnaggcaangancgactgcatncattaaggataccaattggcc

SEQ ID NO: 559 - DNA, 260 bp, Homo sapiens
  misc_feature (1)...(260): n = A,T,C or G
caccaggctccacacgattgttagaggggannntgatgcgggcatggacacaggcngnaggcctagcgctcgcgaagctaccggncatccctcaatcgcctgaagcccggcatcatgantggcncacgganaccgaatttgncgcccttgcttctggctacgtctgcttgacttgcncgaacaattccncatcctttcaaatttggaaggnagngcgangctcacnggtaaaccattnggntgacttttatcaaaaccgc

SEQ ID NO: 560 - DNA, 439 bp, Homo sapiens
  misc_feature (1)...(439): n = A,T,C or G
actgaggtgctgaagcataaaacttcaagagatgaatttctatagccagcagcagtgtcttctccttgccacctattggatcagcgtaaattttcccaaaagacatgctccccgaagcccttgnagtcttgattatagcctagaagcccccacgccaccccctacaaaaagcccatgtgttgagggcttgatctcaggatggcactgtgcggaggggtggaatctttagaaaggggcacgtgggggaggggcttagatcattgagggtgtgtctctttcttttgcctcctggatgtgaggcctgaggctttgctccactgttgccaaggctgcaatgagctgcctggtcacgtgacagggccaacccaaccatgggccggaacccaaagttccagaactgcggcccaaataaacctttctgctttgtcaaaaaaaaaaa

SEQ ID NO: 561 - DNA, 173 bp, Homo sapiens
  misc_feature (1)...(173): n = A,T,C or G
ggatgagcgatatggngaccctttngcaagaggnaggacaccattgaacaggatancatcaaaccactagatgaccngcnagaaacnnatagagcatggngtcancattgtngatgacctggnattgagaaggtgggaccaagggaatcggctnaaggggttacacgtcttga

SEQ ID NO: 562 - DNA, 135 bp, Homo sapiens
  misc_feature (1)...(135): n = A,T,C or G
cggctttccctgatacngtggccgaatggagatgngaggagctgcacccggncggatggnatggaaacatgaagagnaggggagcatttncacctttnccttnancnnccacagtttctctactttcttcaaagt

SEQ ID NO: 563 - DNA, 275 bp, Homo sapiens
  misc_feature (1)...(275): n = A,T,C or G
gactgaggtggcctctgggctgaggcagagcctgngcggcggccatanttacttcnngnngactctcannggttgctcaggaagcnnggctggntccntagcagaatgcnccnnnttctcancatccggcaacctggcacctggcgccgtccagaccagaggccatgaagcagattctcggcgtaatccgacaagaaacttcggaacctggagaagaaaaagggtaaacttgatgattaccaggaacgaatgaataanggggaaaggctcattct

SEQ ID NO: 564 - DNA, 290 bp, Homo sapiens
cctgttttgtctgatttgttctgctcttcttgagtcaggggctcatgtggcccagactggtcttgagctggtctggagctcttgatccccctgtctccacctcctgagtgctggacttgcaagccagcacacccagcatcgcttacagctgaagtcacctttgttagtggagagatgaagtacaaactggacttggtttttcaagtattattgtatgggcatagtacatacaagcatgtattttacccatatgagattctgaatctattaatgaaaccatattttcctgg

SEQ ID NO: 565 - DNA, 175 bp, Homo sapiens
  misc_feature (1)...(175): n = A,T,C or G
cccgtcgggtatacagttcccagcatgcagcaccgtcncccttngntcctngacgcccagatggaccctgcttcgnaaggactttttggactccagaggacgcttcctcngagtcacancccacctggaggcatgtggctacggngaagtnntggccggttgagtctgttcaggc

SEQ ID NO: 566 - DNA, 211 bp, Homo sapiens
  misc_feature (1)...(211): n = A,T,C or G
cagggacgctctatgagagactccnggtccaccagggaacctgaaagccaaggacagcagaatagcaggcacagtgaggaaatgctgaaggtcactatttcaaacacaccaccactggcttctaacctgactctcccagagaccacagggatttaatgtaacaacagaatggattcataaataaactgcgagcacgtggtgggatttaatt

SEQ ID NO: 567 - DNA, 152 bp, Homo sapiens
  misc_feature (1)...(152): n = A,T,C or G
gttttgaggaacaagcagacagatttnnaacatctctgtttccagcttctctgatcatcatgatgaagattagacacagtgagtttcttctactagtctcttcaaagcctatacatttaatagtcatagtatttttcacaacaacaaaaaaa

SEQ ID NO: 568 - DNA, 310 bp, Homo sapiens
  misc_feature (1)...(310): n = A,T,C or G
atttggcccgggctttttttttnggngnaaggaggaatctttncggggttaggccccaaaacttattcccttcacttattggggagggttggattcttcccttccanggnccccccaaagggaaacccctttgggaaaanggccccaaggccttgggggaaaangggccccccttcccngcctttgggggggnaaccaatttcaaagtttccccccccaaaagnctttnntnggggaaaatggggcccctncnaaancccctttcccnaaaaaatntgggnggggggggggggaaaaaccccaaaggggt

SEQ ID NO: 569 - DNA, 106 bp, Homo sapiens
  misc_feature (1)...(106): n = A,T,C or G
gggaatgcctcctatcgagaacatngaggactccagatgagngagactctngatgaccaggacagggggtgacactcccccccaccctcccccagacaaaataaaa

SEQ ID NO: 570 - DNA, 193 bp, Homo sapiens
  misc_feature (1)...(193): n = A,T,C or G
cacctttgtgagaggagagtatgggcnctgtgctnatctccagtgctccaccattgancgcgngtgtcctgactctctntatgaanggaacaactatatacccantggccccgcgactgttncgnaaatggaccancaccacactngnnactgctggccatgcccgncataatccacccaatcgacaggtcag

SEQ ID NO: 571 - DNA, 130 bp, Homo sapiens
  misc_feature (1)...(130): n = A,T,C or G
gccctttgactcaggttgcaggccacattgatngaagtcagagaagcctgggtcaagactattctttgnttatcntttnctggggctactcgtacaatcctgggtttctgtcctaggaaaataaagaaaa

SEQ ID NO: 572 - DNA, 151 bp, Homo sapiens
  misc_feature (1)...(151): n = A,T,C or G
aacaacacaacctgancagctnagcccgcgtcctcctaaatccacaaagcnngcaagccaggaaacaggagagaagatagcatgtttacatattcatactgatgattntacatantcatacagatgcaggggattaaacctcctcttttta

SEQ ID NO: 573 - DNA, 168 bp, Homo sapiens
  misc_feature (1)...(168): n = A,T,C or G
ccaaattggtcgaaggaactggccacaggccttctacagccttnanaccctctgcagagctttacggtnngnagnttccaacccatgtggnagnatncagcgctaactctatgagggcttttgtncnggggancccaacacagctcgaccgggcatcacacccagtgg

SEQ ID NO: 574 - DNA, 121 bp, Homo sapiens
  misc_feature (1)...(121): n = A,T,C or G
cgacccccccccccccncccccccggggaaggnatttttggggggggggnaaaaaccccgnggggaangggggggngngaggggagggaggggaggananagangaaaggggggagaaaaa

SEQ ID NO: 575 - DNA, 124 bp, Homo sapiens
gagagatcgctggaatgaaattgaaggcggtgggacactcgtgtaatcccaacactaagggaggttgccacacattctgggccatggactaattatacagcaagagcctgcctaaaaaaaaaaa

SEQ ID NO: 576 - DNA, 146 bp, Homo sapiens
  misc_feature (1)...(146): n = A,T,C or G
ctgaggccagacacttgaagagggcatatcaagcagganacacttctgagcggccacacaantttcaaatgtgggttggcanagaagcgccncccncccanggaacctctaccnagctaccnnccatggggggattaaaagggggg

SEQ ID NO: 577 - DNA, 233 bp, Homo sapiens
  misc_feature (1)...(233): n = A,T,C or G
atatgctgaacaaaaggaagggatgacctggngactggaagatgacangtcttaaccaaagaagtcacactaatacctacttgggcaaaaatcaagaaacactgttgcttttttgtttttgcattgaccctttcttctggctgcaagcttctgacatattataagcttctatgataagagattgtacattagttaatacctaattaaaattcatactaattataaaaaaaaaa

SEQ ID NO: 578 - DNA, 197 bp, Homo sapiens
  misc_feature (1)...(197): n = A,T,C or G
ggccgggcattactttaggggaaggngcatgccctttcagagcctnctgaagtttgaaggnngctttcttgggnttcctctgncngaccgtnggngatcggcatgtatacaggngcgnctagcacggaaacatgccatgctcagttangatccttgcctctccgctagagggaattcgcctctatactttttaaaaa

SEQ ID NO: 579 - DNA, 117 bp, Homo sapiens
  misc_feature (1)...(117): n = A,T,C or G
tgaggccccgctgagganagagtccttcnaaccggnctgcatgcagtggnagnntatntactgngagaactgccggatcacattcgggtggaantancgaacatagccgttggagag

SEQ ID NO: 580 - DNA, 113 bp, Homo sapiens
  misc_feature (1)...(113): n = A,T,C or G
tgctttaagagccaccgcgngggccnatgggagnctggacgaaggaaaagcgcatttaactgttntctttaaaganncaggctgtntagatgcggagaatacccgaccccgag

SEQ ID NO: 581 - DNA, 188 bp, Homo sapiens
  misc_feature (1)...(188): n = A,T,C or G
accacggagagccttattctgggctcccgagagctgagaacagacaagaggctgacctgacctctgggaacagctggactcagacttccagttacctgccccctcctccaccccggttctgactnggggaagggtttggctggggcattctacaaggaactcataaacatatcttgaaacaaaaaaaa

SEQ ID NO: 582 - DNA, 299 bp, Homo sapiens
gactgaggagaggatcctagatatccacagttggtctccaggtcactatgtagagccctagagaaaaatgagtatctgcataattaaatcaatgtctcgtatataatgaatatcaagtcgcaaaagaacgcaaagacctggcaacacagttcgagacggaggctgcctgacctccttggaagtttcctcagtttcttcctcacagaacgttccccctccccactgtcctctcatgtctcacagtgagaaggacaccaaccagaacaataaaacaaatcttagaacttgaaaaaaaaaaa

SEQ ID NO: 583 - DNA, 110 bp, Homo sapiens
  misc_feature (1)...(110): n = A,T,C or G
tggagggcactccagaggcggaggctgcaggatgggaacatngccaganccncgnggnacagaacaagaagacctttacgccaccatgtnncatgtggcaatccctgcga

SEQ ID NO: 584 - DNA, 264 bp, Homo sapiens
  misc_feature (1)...(264): n = A,T,C or G
actgaggtgtgaccagctgcttcaagctcctactgacacaagggactatatccttgaactgtgagctgagacaagccctttatcttttgagatgtctttctcagcgaattttatcagagcaacaagaaacgaaatgggagcacacagtaatcgagggactcttcttttttctttgcatataaagntcagtctacttctaacaaccattttgtgtatgttcatataaaataaagtattactttttgataaattacaaaaaaaaaa

SEQ ID NO: 585 - DNA, 103 bp, Homo sapiens
  misc_feature (1)...(103): n = A,T,C or G
ctcccctctggctggcctctgaaggangcagcggncgntttctggagagggccgtggcggaggtctgnnaccaangcgggccgtggaatggactcacaaagga

SEQ ID NO: 586 - DNA, 121 bp, Homo sapiens
  misc_feature (1)...(121): n = A,T,C or G
atttgtggtaaccttgcaganncagttctctctctaccacacggctcccagggtatcaaactccggactccagcatctacagtaagcacctttatccaacaacccaataaaggaaaaaaaa

SEQ ID NO: 587 - DNA, 134 bp, Homo sapiens
  misc_feature (1)...(134): n = A,T,C or G
tgagtgctcctgagtctttgaggacacagcctcctggtggaagttcgtgnntgnnnagacagaggtcacntnccaggaantncatgaccaacacgcctnattcataggagcnganggaatgtgttggccttcat

SEQ ID NO: 588 - DNA, 135 bp, Homo sapiens
  misc_feature (1)...(135): n = A,T,C or G
aagtttaaaccacccattttttattccaaggaaaacccattcttttttagtttattcagnattctggcccattggggggaaagggttggccccttcttcccccagtttcttccnaaggctttttagtggggcagg

SEQ ID NO: 589 - DNA, 116 bp, Homo sapiens
  misc_feature (1)...(116): n = A,T,C or G
gcatgggcaaccattncagcangctgcntgtatctctgcaccgaatgctccggctggagagcctggcaagaaggggcaagtactgccttgctcctcaggataccctgctctgagca

SEQ ID NO: 590 - DNA, 154 bp, Homo sapiens
gactgagacccacaggtaaaaggggcagcaatgtagcatcctaagatgaaaagagcctgtcatggaggccctttcttctcttcctgctccaagcctcatcgactgtatccactaccacacgtcttctaaataaactttaccctctaactgcaaa

SEQ ID NO: 591 - DNA, 105 bp, Homo sapiens
  misc_feature (1)...(105): n = A,T,C or G
gaagaggctggcctggaggctgatgaacccngcnnngatgacaccctgccttntgacaccgnataccntcancgactnggactcggaccttagcttacctagcgg

SEQ ID NO: 592 - DNA, 241 bp, Homo sapiens
  misc_feature (1)...(241): n = A,T,C or G
ggttcgccacgggaccgctaccaaggcagatacataatccatntgccccaaccaatcatgccancccantcaagtttacanagtgcaacntgggcactgccccaggnangtacaacatgnacctnttccaagagatcttcngggaaatntggggagggtctccctctctgaagctngagnnatnngctatttatgactggngcnggtgnaanccttttttccgggaacatatgagctgtgt

SEQ ID NO: 593 - DNA, 393 bp, Homo sapiens
  misc_feature (1)...(393): n = A,T,C or G
ctgaggaatgaagatgtttatatgtgacgagnctgaagctcgacttgtcatctctaagtgcacagtagctgtggattcctagaactgggcagccctgctctacagtgcgacaacatgaaggccagcagtcattggacaacagggagaaaggagttcagcacctgtgaagcaaagccaagaagtggcaccctgcaggcatggcagagcttatcagctggtcctgaagctgagagacagtttcttagagggaagtcagaagtcgcccacacaatcttcacagacaccagctttaccataacatttgaatacagtggcaacttcctgtcccgaagcctcgccttttntggtacttctgcccgagcaactgtaggtaataatcaaaggactacccag

SEQ ID NO: 594 - DNA, 292 bp, Homo sapiens
  misc_feature (1)...(292): n = A,T,C or G
gaggccgtagtgacttgttgtggaantctccnggttaggacaggaagnaaggctggttgcntacnnnaagaagagtanacacagacctagatgaagacagcatactgtcgttgagataacggggcctactgagctagccaagaatgaaactgaccagtcctggaacaagttacagaactgtgtccacatcatagctgcagagctatccatcagggtgcctgggggcatgcccattggttgagtgctcacttagcatacaggaagccctgtggncaatctctgcactacataa

SEQ ID NO: 595 - DNA, 111 bp, Homo sapiens
  misc_feature (1)...(111): n = A,T,C or G
tgtgtcctatgccaggaggaaggaggagcaacccnatggttancggtatcananaaggaaancttnggtagcatgnacatgtactnagatactgggcatagtcagggaaca

SEQ ID NO: 596 - DNA, 177 bp, Homo sapiens
  misc_feature (1)...(177): n = A,T,C or G
acaagaacagttcccttnntntggggactaatcaaacatggagatggcgtgatcagaacacatcacacacatccttcttgaacatcagcagcgtgcaaagatgatttggtttctcaccctgactttatcaggaaatacaactttgaaaaacaggctccccaaagcagcacatataca

SEQ ID NO: 597 - DNA, 136 bp, Homo sapiens
ttctcacgaacacatgctctggaaacaggaagtccttcttagagacctgatctttctttggggaccatattcagtgcctggcaaccatgagggaagtatctggccaacactgaatagaacacttgtttgccatcca

SEQ ID NO: 598 - DNA, 104 bp, Homo sapiens
  misc_feature (1)...(104): n = A,T,C or G
catttgtaccaaaataccntgataaaaatgtacagcccttgttagtacncgaggncntgcattcaactgtgcnacttatatnggccaagaaggcttgaggggtt

SEQ ID NO: 599 - DNA, 142 bp, Homo sapiens
cggctctacagagaacagttgaagctttctccatcatccagtgtcctgtctcagctttccactgtgtctgcctggagcaggtttgtttattcagcaacttgggaaacaaaatggttttaaataaacttgtaatagaaaaaaa

SEQ ID NO: 600 - DNA, 149 bp, Homo sapiens
  misc_feature (1)...(149): n = A,T,C or G
ttttctagcaaagcagtaggnnaactacagaaaacagagcgtgngagctgtttncnctggcatgcncccatagcttgnaagnatcaaantaatatgccctccagtnnttattnantgtctctgaatcatgngcctgttctttgtgctaa

SEQ ID NO: 601 - DNA, 264 bp, Homo sapiens
  misc_feature (1)...(264): n = A,T,C or G
acgggggcaaaccggggacnggacaaggacangncgccagaaggaagantacngcatccagaaaaagngccgggacaaagcagggaagacgaccncgccggaacagacaaaaacacgcangancaaganccacagnggggcangagncgnacccanaagcaccaccaccgngggacgaaacannggcaccgnggacgngggaaaggcacgtnncatggcaggggacncaaggagggcaggaagagncgaagactaggagggaca

SEQ ID NO: 602 - DNA, 121 bp, Homo sapiens
  misc_feature (1)...(121): n = A,T,C or G
gcagccagaggcccagagttcaaagcccagaaaaaacaggggggnccacaaccaancgnaacgggagccgangcccncaccnngggggggcggaagacagcaacnccgggacccatagaca

SEQ ID NO: 603 - DNA, 218 bp, Homo sapiens
  misc_feature (1)...(218): n = A,T,C or G
acggtcggaggacaggtacaggaagcntggattnnttccatatatgcnactggcctccgagtcagatnangaccgatcctggatacngaggaganagagngatccggaatgaanagaggggtncnagancttgaagcncncaaccaacancatgctgagtgtgggactgnacgtggccagntcccctcggggncagccctggaactgttaaagatatc

SEQ ID NO: 604 - DNA, 123 bp, Homo sapiens
  misc_feature (1)...(123): n = A,T,C or G
gggctctctttgtgcaggngctgtgcagcacngggacggctgggtctnactctatacatctttctgntgcctgancaagcaccgaagctgtgagtggagctganggntggagaccttcaccca

SEQ ID NO: 605 - DNA, 463 bp, Homo sapiens
  misc_feature (1)...(463): n = A,T,C or G
actgagggggagtcttgangaaactgnntgacacaaatgtcactgcctaatggtagtagattgagaggagaaagctatcagacctgtctgggcagattttctggctggcggtttccaagttcttcctaacacccctggctgacaggtaaggcttttctagaaggatctggactgaaaggacttctggtttctatgaccgaccatganaaaggatgagaggtaagagacagaangacatgggacatcagaaattgacattngaagctatttctgtgcactctcacttgnaagttntctttantgaaccctagtatttnatatatgcagaattggcnctagatatcaatttttagttcttgagagatgaaggtttattgcttctgacaatctggaaatttttggctaataaattatttattggaaatcactgacttgananntaacctgaaggcttctgccgttt

SEQ ID NO: 606 - DNA, 250 bp, Homo sapiens
  misc_feature (1)...(250): n = A,T,C or G
ggtgagagcagttccatatgagcagtcccattgtggatcctgacctttnctcntgngnaccnngtcggggntntgngtnanganagattcagctgtgtcacccactgatgncacctgggtctgggtgnctttgggaagagactccacttgtgtgaacccactaggatcttgtgagaatctactgggggtgatgggngcanggnganagancncagccgctgacnagagcacaagctaggccattgctgaa

SEQ ID NO: 607 - DNA, 377 bp, Homo sapiens
gtgttggatcccttgggactggaattacagacagttgtgaactggagtggggattcctgtgagggtcctttcctgaatccctgcctgggtgctgaagaagctaggggcctgcaaggagaagagagactttactccaactagcctcctgcctcaccgctttctatctatcctagacagacctcagttgacagcaggctcctacatatcggttcagcaggaactacagggaccaatttgccctgggcccagccagagacattagatggagaagggttatcctaccacggaggacctcacagatcagtgaggaggcaggaatatctctaaaggccacctgtccacagtggacacctgacccaagaacagaggtgcactta

SEQ ID NO: 608 - DNA, 116 bp, Homo sapiens
gaggaaagtgcaacagagggaagggactgtctgacaaaccagcacacctgaagggctctccctgtgcgcctgcccgaggaggacgaagggagagaagaagaaggagaaaaaaaaaa

SEQ ID NO: 609 - DNA, 154 bp, Homo sapiens
gactgagggctggagacctgttgactgactgagccggcttggtcagctggggaggtagctcattgctacacagctggcttaaataaagtgtgaaaccctggcttcaaccctcagtaaataaacaagaactgagagatagataaaatcaaaaaaa

SEQ ID NO: 610 - DNA, 339 bp, Homo sapiens
  misc_feature (1)...(339): n = A,T,C or G
gaactgagggaaaccagggcatttcctaccagnggcacatgactgcggacctagactcgagggtctgctgctaccgctggttcccagactccagtcaagtgaccttctcttccagcccctgagcgcctcccacccccacgccacctgcccatgtggtaaattggttgagcacagcctcatgtggtgcaccagaaatccctacatttgggaggctgagaaaagacgggnnnctgnntntgcatgaaactngngtctgtatactngaccaccttntaaccncannntccgnnatncgcctgcttatgnctncgnagtgctgagattaaaggcagtgcacaa

SEQ ID NO: 611 - DNA, 231 bp, Homo sapiens
  misc_feature (1)...(231): n = A,T,C or G
tctttttccctattatcagtgagaaaagagtccaaaagaaaacatgtcagctatgattaacacggaacatagtctgaatgactgtgtgaagcctgccntcccccagcctnaaacctgatgcgntcatgggnggagcatnccgtgatcattagtnctgnnacnctcgcanntgctgnaanctnggaannnacaanctgngcaccgttnttattggaccaggaaattattcgg

SEQ ID NO: 612 - DNA, 306 bp, Homo sapiens
  misc_feature (1)...(306): n = A,T,C or G
attatgtagggaaaacgggcagcngttagnagctaccacttaaaacaaccaggttgccgtgacctaggcttgnnatnccagcattgagggaccagnctgaactagacaatgagaccttgnctncacaaagaaatggcccagtgagatanctcatcaggacctgcttgctgccaagcttgacaacnatgtgtttggttttnttctgacacagtgggaagaaagaaaagcctcccaccanctatncatgagggccatgtgtgatatcccaatnaataaaagcatttnncttttccccaaaaaaaaaaa

SEQ ID NO: 613 - DNA, 255 bp, Homo sapiens
  misc_feature (1)...(255): n = A,T,C or G
tgaggatttttaggggaaaagcagctganttgggatatactgntgcttcccttgnagncctgcctncggcctgatcaaactgacagaagcaggggaggcaacaacctccacagncttctccagtangaaagctgaanccaatacatgagtctttgngcccatganaactggattcaacaggaagtanttgaaattaaaaatttgaaattaaatgnaaataaattcaatgtaaaataaatagaaattaaaatttaa

SEQ ID NO: 614 - DNA, 103 bp, Homo sapiens
gagctgcagcagcatgctgatgttctgaggaatccttgagagatgactgcaagagcaaaagagagtgcctgggagtcacaaagcacaaacaaacaaacaaaaa

SEQ ID NO: 615 - DNA, 393 bp, Homo sapiens
  misc_feature (1)...(393): n = A,T,C or G
caaaggtgaggccagtgagagcaaagaacccgggcaacgtctctcagccgagaagacaacgccagccctctcctccccccagcttctgggcgantcttccacgtccgaccggccactctaccaaccgcgacgtcagccggaagtggcatgtgcggggctgtaaacaccgnctgcgaaatcacagcacccagctcccgaccccgccccnacgccatgtgatgctgcccgcccccgccgncgcctnattgggcggccagctttgtttaccttatatggccaggtcctaacaccccgtgacggncnatnggnacagttncgacctcnntnangtgacgtcactggganagaaagatgcanatanaccggggcattgngggaactgccatggaggca

SEQ ID NO: 616 - DNA, 258 bp, Homo sapiens
  misc_feature (1)...(258): n = A,T,C or G
ctgggctggtgagatgactcancggtaagagcactgactgctcttncgaaggtcgagttcaaatcccatgcaaccacnntggtggctcacaaccaccatatatcgtgaagccttcttctgnngcttttttnngtcagctacagtgncaataaatcttgggcctgagcaagcagggactgagtgagcagncgacccanagngagaagaggttctaaaaattcaatnnccaacaatcacatgaactctcacaaccatctg

SEQ ID NO: 617 - DNA, 153 bp, Homo sapiens
  misc_feature (1)...(153): n = A,T,C or G
gactgaggaggatcttgtggatcagaggccagnctaggctaaagaggcctgctgntaacanggngtacagatggaanaacacttgnnactccnncatttggaaaccacgaggcatatagtannacggaaagtccanagcgcaggcgttcagca

SEQ ID NO: 618 - DNA, 172 bp, Homo sapiens
  misc_feature (1)...(172): n = A,T,C or G
cggctccctccttggtctctgggctctccagctnctggttnttggtcccacaggcagtgnctagcatgggntgngctntngnagcatggatctaaaactgnaccnancattggttggccacccactaggggcctttnccccttgatnactaatttgagaaaatgccttacag

SEQ ID NO: 619 - DNA, 338 bp, Homo sapiens
  misc_feature (1)...(338): n = A,T,C or G
tttgaagtctgaacgatgaagaatgtcaagtcttgacctgccccttgntncgtgagaattcaacatcaataagaacatctttgaggctgctcgctaccactaatatcaaagcaggtgtcaaaagagaaatctcagcaaagccacagactaccactaagagcagttgttgcactggaacgtgatccacccacaattaagtagcaatgacnatgacgtcagcgtgccccactggtnagaagagataaacacgggataagggtgntgctcaatgctanagtacctgtntagcatgcatgatacactgggttctatacacagcgctgagaaaacaaaataaa

SEQ ID NO: 620 - DNA, 155 bp, Homo sapiens
gagcagacctctatggaagcatcagtgtccttaccggccacttctctcatcaaaagctgactctcccttccccagaagacttcaattgccaaagctttcacggactggcctgactccaccttaacattaaaagccatcttggtacaaggtcacaa

SEQ ID NO: 621 - DNA, 125 bp, Homo sapiens
  misc_feature (1)...(125): n = A,T,C or G
gcagtacagggagcttgtgagaanatcanaaagggcggacggacatcgnagaggcggngccatgatnggcananagnngaataaccccnaccatgcgttcagcagnttggctatcagcgccgggc

SEQ ID NO: 622 - DNA, 243 bp, Homo sapiens
  misc_feature (1)...(243): n = A,T,C or G
tgaggcattgaagacaagaccctccaaaagaaattctctgaggtgcagaaagagagaagagaacaggcccagcggactgttttgatacattgtccaaataatatcaatgagaaaaaatttctcaagtatttatcccagcatggaccagtcaataatcatttcttctacgagagctttaattttnccgnatggacagtatanaggcattgcagananggaacacatactgcaacccggagcaca

SEQ ID NO: 623 - DNA, 334 bp, Homo sapiens
  misc_feature (1)...(334): n = A,T,C or G
aggcctgggcgaggggcacaggacagntgctgntgcagntnccatgaatnanataatttgccatttaccgatggggacccggncggggactggaanatgggacctggggnatgcaanacggggcgnatcngatatgatggaatataagagtagnacctataagtngngatatgcctttaatnnnatatatggaaatnnatcangganttactactagtagctcttgcagaaaatcttaagggaaatancgaangaggcctatnncaccnctagaacatnagcaggacgcgccactctggctgnacncactcaagaataggacgagggacactaa

SEQ ID NO: 624 - DNA, 167 bp, Homo sapiens
gactgaggtcttcaggcttgcaacaaatacttgaccggctgaaccatctctcccacccctctgaacttcaatcttaattgaattcaattgtgaccttggatcttaatcagcaagtcattctgtcctcaactccaataatagacttgcatcagacactaaaaaaaaaa

SEQ ID NO: 625 - DNA, 270 bp, Homo sapiens
gactgaggtactgggaggcatagtttttggcaatagccagccaaggatacagggaacaggtgcggcgcctgcacgctgacttcacgtggtggatgtctggctgagagagaagtaggaaatcctcacaacgcttcttccagctttgatctgcctggggcagcccgtggtggaagatgactctgtagccctggtgtctaccagtatccggagtgggagccccaagagccatgtagacaggcacccagcactgtgccagctataaaaaaaaaa

SEQ ID NO: 626 - DNA, 271 bp, Homo sapiens
  misc_feature (1)...(271): n = A,T,C or G
gactgagagtttcccaaaagtggaccantangacatagctgcagaggcatgctgtccatgctagtgatggttctcatcctgctctccggacttctgggaagctcagacccaggaaggctgaaccctaanaggctcagaatgatgcatagcctcacagaaactcggggtgagtgnccntggncaaattggntgtgtgtncagtgttttanttntcacaaggaaaagtgggctttacattnccaaatataccactcactcaattaaaaaaaaa

SEQ ID NO: 627 - DNA, 221 bp, Homo sapiens
  misc_feature (1)...(221): n = A,T,C or G
aggcattcgatgaaagaaaatgaactgaagttcatcatgagcgcanggcttctgtacttggcgtncctgcatggaaaggaaaacagcgatgcatgttcacagntaggtcctaaactcctgnggtgctaattcctccataatccaatggtgctttttgtggatgctaactgcacacatgctgaacaaggccttgaaactcaaaagttccctcccttcctctg

SEQ ID NO: 628 - DNA, 152 bp, Homo sapiens
caagaacaccgccctcagaccagcccattttcttcaaaacgcctgtccagattacagtcctgttcaaactcttcctctgggttcactttctcatagtgttaacggaaagggcgaattaattaattaaaccgagaatgatgataaaaaaaaaa

SEQ ID NO: 629 - DNA, 144 bp, Homo sapiens
agagagccatttctgctttggagaaggcaagtttaatgaagagaaagaaaaacaggagcagttgctactgagactcctcgaataccatcggctgcaccttgcaaacactctcaagtggacatgaaggaaggggtggggggaggg

SEQ ID NO: 630 - DNA, 217 bp, Homo sapiens
  misc_feature (1)...(217): n = A,T,C or G
cccccccccccccccccccccccatttcngggcacncnccccccgnttnagngctnaaacatggagagacctcggggcaggggctggagcagttccnggccccagacacagcatggctgcacagctctgnagcacggagaagcanagccnggggaaaagactctactgtcactggcagaanactcaaccatnaccgctctagacagcccccaacagc

SEQ ID NO: 631 - DNA, 255 bp, Homo sapiens
  misc_feature (1)...(255): n = A,T,C or G
gactgagataacttctcaagaacctgtgtatcggatcctaactaaatcaaaatgtttgaaannanaagatcatganngaacaanantttgngctggnanctgtgctactgtgtnnnnactttcattacanntgtgtgactgacnggggctcacctggcgtgagcgnttccccgtcagccgacnngactttctacaagcatggtgtttacaataaagtaatgcttaaggaattactttttgatcagaaaaaaaaaa

SEQ ID NO: 632 - DNA, 491 bp, Homo sapiens
tgtgtgatgttccctcctgcaacactctgaactcttactccccataaccaccacctcttctacaacttcttcctcatcctcctacacatcatcatcatcaattatcatcatccgcatcggtttcttctccccgaggctggttaagggcacagctactccaaaggtcctaatcgatctcactgcataatcagaaggctctcaactccaggatctaagcaattcttctgcttttagcctttcaagtagctggactatctgtatgcttcaatgtccttcttctggaggcagattttaacaatcgtttgcagggtcacaggaacacaagccatgctccaatgggacagaagaacccatgctccaatgaacgagatggtggccagcatataataggcattcaataaacggctgagcgcatgacgacaagaccacattgctgagtgtagtttggacggttgtagctcttcttgttccaataaagcaggaagtagcac

SEQ ID NO: 633 - DNA, 146 bp, Homo sapiens
  misc_feature (1)...(146): n = A,T,C or G
gactgaggatcggatctgaacccagtgncatcacacataagcgacagagaccatctgcagccatggcaaccgctatacattcccaggatccacttggctgaggagatgacatcaatgcttaaaagcctgggctgctcttccagagg

SEQ ID NO: 634 - DNA, 479 bp, Homo sapiens
  misc_feature (1)...(479): n = A,T,C or G
gactgagtttggtacagcactggntgctccaaagaaggctaaagagatcacatgttcatcttaagaagacactggctcaacaaacaagtcttcaccgagtcctgaataccatgaatttactaataaccttaaaagaaaaagcactgaaagtggacagcaaagggcagaagaccttagaacatctttgcggcaaccagagacaggctagagcacaccagagctgcaccgctttcactctgttacctagcaatgttgttctcacttttagagtaaaagcacaggatgtccttttctctgtgctactgtaaaacgaagtgaaaaagtgttacctagagttaattggtaatttttttctactttgtatttattacatttagctataaaggtttccacataaatcacaaattcttaatggtgcgctttaatttcattactctttttaattgtgataaaataaatgttttaattgctagttatat

SEQ ID NO: 635 - DNA, 115 bp, Homo sapiens
  misc_feature (1)...(115): n = A,T,C or G
cactgaggcgttggcagcctcctcctccatgggtatttntgtaagaagcgccctctgaggatcttttgagaagccanttcanagngagttgagagggagaactcaccaagttact

SEQ ID NO: 636 - DNA, 460 bp, Homo sapiens
  misc_feature (1)...(460): n = A,T,C or G
gcgtttgatgcgtggntcctnctgctcatcacctggcattttgaggtctcancagnnnaagagcgngaantatnggtgcagagcgtgcnggcccaaatcctnnctagcctacaaggatgnggnagtgccatggactncgactnngctggggaatcanaacacagccctggnggtgcagagctgtccgncaccggtcctgtggcaacagccctttgtattgacttgngaagcccccaatccagactgggccagactgaatctggntgccctgangtgtatcgagtgctcagggatccaccagacacctgagagcttcctgtcccgagnccgctccttggnccttgacagactggccaccagaactgctgnccgtcatgactgnaatgngcaacgccttggctaacagtgtctggganggggctctgtatggttactctaaaccaggcccccaaagccttgc

SEQ ID NO: 637 - DNA, 135 bp, Homo sapiens
gactgagaaaaagtgtgaactttcagctactgctctagtgccatgcttgcctgtctgctccagtgctcccagccacttcactctgaagccattatcctcaaataaaatggatttcttttttcgtaaaaaaaaaaa

SEQ ID NO: 638 - DNA, 139 bp, Homo sapiens
  misc_feature (1)...(139): n = A,T,C or G
tttttttgttaacacttgtgtaccnagaaaccnnattgcacnttctgntgncctgagcncacncaagctaggggacagcagngtgaatgctgtcncnatgantgaggttatatggaatcaaagaaggatggatccacaa

SEQ ID NO: 639 - DNA, 199 bp, Homo sapiens
  misc_feature (1)...(199): n = A,T,C or G
gagcaccatcttcattgaaaganctntggtagctgcgcagntnctctggantgcactttatcagtacagggcctgngancactgcctttnggcacctgnagaaggcaccaggagaatgcccagaggctgactgggaaaccaagccagattctaccactccntagngctatgcagaagagccgtaaggacgctccaccat

SEQ ID NO: 640 - DNA, 247 bp, Homo sapiens
  misc_feature (1)...(247): n = A,T,C or G
tttctctgaagtaaccctcctgcctcagctatccaagtacctgggactttgttggaaagnataaacccanngaccgancaccgancacgnttagtgatggaaaggacagaggaagtgtaanccganaagancccatttaacgccgagaacaagaaggggcncagaggacaacnngagggagngagcctgctcctcctaccagcngggtnntggggatcaaacncaggttatcagggctggcaataaa

SEQ ID NO: 641 - DNA, 197 bp, Homo sapiens
tttggtccaacgtcatcatactttttggtcctaccatctgaagactgagcaagaatcagcttcaagccagtatcttctcatcatgacactcatgctatttattctatttgtaatatgatattttctcttcccaccactccaagtaatagttattccttaaaatacaacttatttgttcattctcttaaaaaaaaaaa

SEQ ID NO: 642 - DNA, 154 bp, Homo sapiens
  misc_feature (1)...(154): n = A,T,C or G
gtccctcctggctgtctccccccactcagcggctcacaggtgaagagggtctcagcgtccagacgcaagcagcattttatcaaccaggctgtgaggaattcggacctggtgcccagagctaagggacgannntaataaagccttggtgctagaa

SEQ ID NO: 643 - DNA, 109 bp, Homo sapiens
  misc_feature (1)...(109): n = A,T,C or G
gaacacttttgcggggngaggaagaacccagcngcagcnagcanggggcagcggccgcncgcgcgcnggggcgggnaccgcgcgcgcnggaggagaacacggggccaga

SEQ ID NO: 644 - DNA, 137 bp, Homo sapiens
  misc_feature (1)...(137): n = A,T,C or G
ggaaaccgaagccggcgcngcacgggggggagccnccggntnacncggggccgcnaagcccacngcaggaaccagaggngccanacacggggcaccaannggacaggaccnggagacagaggcggcgggaagcaggg

SEQ ID NO: 645 - DNA, 148 bp, Homo sapiens
  misc_feature (1)...(148): n = A,T,C or G
tatatgtatctaaaatgnaaattataggatattacaagaaggacttgaataatatttttgcacttttagctaacaacttttgatttctctttggnacaaactaatgatttcctttttgaagtataaanatctttttcaaaaatcaaaa

SEQ ID NO: 646 - DNA, 142 bp, Homo sapiens
  misc_feature (1)...(142): n = A,T,C or G
tacacttgaggcgaacagagtatnccactgctncttaatatgaaggaanagccaagcactttggnccttaaccangtgattatgtactaacgggntanatnntcccnggangttttgtgtgttnaaaagaccaagaaatgaa

SEQ ID NO: 647 - DNA, 111 bp, Homo sapiens
  misc_feature (1)...(111): n = A,T,C or G
ttcctcataaagattgggcaaacggntgcgnggtnggcataagctggnaatgngtctgatgngngttctagcttnctttnctgtggctgngattaaaaacctgaataaagg

SEQ ID NO: 648 - DNA, 444 bp, Homo sapiens
  misc_feature (1)...(444): n = A,T,C or G
attgagccaacggcattagcagactgctggtttcttggatgtgacagaacaacagaacaacaggactgaataagattggagctttaaactgcactaagaagtaaatgtaaaggcagtgactaaaaccagtcaatctacacaggggcagttgcaaggtagactgaatggaagaaaagttattagggaatattttatatatatatatagaagaaacaaactgctgcaataaattatgcatgaggcgaggagaaagtggtatgagcactgagtgtggtgcggaggaatcactgacagtagcttctcttgaatgtgaacagtagtttggacaggcctaccaggcatgggatggtgcanagacgnggaattgtttgcatacctaacctttgtgctttctccnngnntgatgtttacccccntcanaagccgagcagaggtgtgttttaa

SEQ ID NO: 649 - DNA, 118 bp, Homo sapiens
  misc_feature (1)...(118): n = A,T,C or G
attattgggaggggccagggaanaaccaaggcccccttaanaacntggcggaccccaaggaaggacttaggagcccatgncgccgccggcttcacccaagccacgagggggaagcttg

SEQ ID NO: 650 - DNA, 224 bp, Homo sapiens
  misc_feature (1)...(224): n = A,T,C or G
gcacgagggagccggannttgactccctnagacactacagcctgggcagnggacacgttagataatgtgaacctggtntnaagcccggngcattctggctgctcgtctccgctgnctcagtatgactcaaggtgataaccctgtcctttgtgttttncatttatgtggcatccctnagnttagagggcatcagtgtctgtagtgtatccacatccgtcaccctg

SEQ ID NO: 651 - DNA, 142 bp, Homo sapiens
  misc_feature (1)...(142): n = A,T,C or G
aaaactgaaatggctttcancaacatctggcagagactcgcanacananctacttancngnnttgnaaacnaggatttatttcttaatatattggaaggttttgtttccttagattagtaaattatcatacagaaaaaaaaa

SEQ ID NO: 652 - DNA, 336 bp, Homo sapiens
  misc_feature (1)...(336): n = A,T,C or G
ctgaggtacattgagctgtaacagagtgccatgtnncagatactcagagttcagtattcacagggaggcacactgagaatgaaacaaagaagcccatggttgacagccacaaaacaacccaaaagcaagtggcatgaacaggaagatgtttcgttgtatgaaaagttggtatgaaggtgttgcaagggacaaaatattaatggtcctgaaatccagtttttcttcataaatattaattgtactaacaagattatgtaatccatgactttctttacaaaaatattttatgttgataaaaattaataaagcaaaatatctctgtctgaaaaaaaaaaa

SEQ ID NO: 653 - DNA, 160 bp, Homo sapiens
  misc_feature (1)...(160): n = A,T,C or G
tggctttggactcaaagatgcggagncnagatggntccagntgcatctnccctaccattgntcagcagattggctatnagcnccgggctctnancatgatggcacgctcacggnttcttntannacaancaatactattacgggctttcttgccgaataa

SEQ ID NO: 654 - DNA, 238 bp, Homo sapiens
  misc_feature (1)...(238): n = A,T,C or G
aggactattttttcattccattccaaagnatggggggttaccaggncaaccacaaaggcctattggaccaaggggaggatcctcccggntgtaatngacaccacttaatacnccaagccttgggaaaatggaaaccccgtnttgtagtaaattgggccannaggganaaaggannccagngcttgggggtttnanttgacccgggaaancttnggngggaaattttggaatcctggaa

SEQ ID NO: 655 - DNA, 446 bp, Homo sapiens
  misc_feature (1)...(446): n = A,T,C or G
actgagatcctcctccnacacagcagcagcagccgcctcctcctgcagatggggtccctccacctcctgctccaggcccacccgcctcggccactccctagcctggaagatacaagagcctccacagccaccacaagctggaatggggatggcaggacttgtgtctcggcttccttggttttcttgcaggatttttttttcacaaccccaagcacaagccccatgtctctccactccttgatacttcttgtgtcaggtccttagttgacactcattgggaagcctgtggtgactgatgtgctctggtcatttaaaaagtaccatgngtctcccctgtccccgtgtgacanatgttggcaggtggnctgcaggtcctgntgngntgacattagtattctttgngngnatctctctctggctctctctctctgctttgcctaaggctt

SEQ ID NO: 656 - DNA, 196 bp, Homo sapiens
  misc_feature (1)...(196): n = A,T,C or G
tcagcatgaatatgatgagcaggttntgatataaaatcaacnggcagggaatatnattnctgctatagcgtacgtactaanagcagtagatcgccggcattagatagtgtnggaaggattaanganttnatnctggaaaaatagaccangngnagaacatatcnttttggaataagnngtcaaacccaagaaagaa

SEQ ID NO: 657 - DNA, 231 bp, Homo sapiens
  misc_feature (1)...(231): n = A,T,C or G
catcccacacagactaggcaagtgctctactgctgaactacatcgccagncctangatatgatcttgtnatggatgacacagaccctgtaaccccacaacttgacatcaggagnttgnaatgcatttctcaacaacatcgtgaacgtcaaggttggnttatggaagaccagancgtnacgnggaaaaaaatgttaaaattanaaaccantataacaacaacaacaaaaaaa

SEQ ID NO: 658 - DNA, 245 bp, Homo sapiens
gactgaggtggggtctttattgtggacgcgtgttggtatacttttgagaaaatgctctaacctgcttgtacttccgataacaacgttggatcaccgctgcggctacctcctgctgctccttcagcctccgaccctaaaggaagagaatgaggccccgtctgagcctctcaaggcccacctagtagactctggaccacctcttcctcccagagtctcctccttaaaactttttaaaaaccaaaaaa

SEQ ID NO: 659 - DNA, 152 bp, Homo sapiens
  misc_feature (1)...(152): n = A,T,C or G
accaataacgccgcttctgcatcagcttccaactccacctgaacagngccccaggagcgcagctgcgcagggaaagaccagcacattacgttgagtgccantcagnagcactgggtcacagttnggaaagaaaatctaaaaagaggaaaaca

SEQ ID NO: 660 - DNA, 536 bp, Homo sapiens
  misc_feature (1)...(536): n = A,T,C or G
ggggatcacctcagagtcacgagcagggtccaaatggcctcttggatacactggcctccctgtaccacacctcctccacatccgagcagaaacaaatgacagtgctggtccacctggctgactctgatcccacctggcttcaggagaactatcatccggatttcaagtctctacaggtcccagatcttgacagggcaattgttactgatccacgccccgcctgatgcctaccccgntgtgaacgatgcccagaacaaggtctctcgggggcagatctactccaagcagaatgtagaccatgccttcctaatgagctttgccacgaagctctccactnaccttcctcttgatagaggacantgncttttgtgcccncaatttcnccnggnacattccgctngaagggggtctacangaagcccaacacatggntgcttctccnagtctcnctaatatgggcttccctgngcnaacttntcnacagnangggacctttcncgtccnggcccactttccttcttccctttacacaagga

SEQ ID NO: 661 - DNA, 182 bp, Homo sapiens
  misc_feature (1)...(182): n = A,T,C or G
cacgcacccagtggctttngcagactgggaaagcacgccaagaagcaaangggnggaagaagaccatagcntcgnntggcagattcctaanggcccaggagaccacggctttgcaggnggaagcccgctgcggcggtgggggctggnttcagcgnnaggggagggaagggcaggcagaagga

SEQ ID NO: 662 - DNA, 376 bp, Homo sapiens
  misc_feature (1)...(376): n = A,T,C or G
tgaggagctggatggaccagctacatcatctagattttcctgcagatgattctgctggtctcctgggaagagtgatccaaaactggctgaaatggaagatccaacagaaaactgaagaacggcagagagatcgctgccagttcccctaaaggatcttactacactgcaagtccctttggagcacagatctgttacattcatcttnctnaattcggtgtggtatgtggcaaagtgaaggcagtttatnaatgttttctgacataaactcttgaagaaaaaccactgcatggttgtttgagtgccttccaaggtaggcataaggatgacagaggcctatagagataatacaaccagcagcaagaccgaaaaaaaaaaa

SEQ ID NO: 663 - DNA, 107 bp, Homo sapiens
  misc_feature (1)...(107): n = A,T,C or G
gaggatcggaacgtcaattaacgtcaattaacatctgacgctgccccctcccctttttgtataatttaataaagaaacgggngcgcttctgtttttaaaaaaaaaaa

SEQ ID NO: 664 - DNA, 484 bp, Homo sapiens
  misc_feature (1)...(484): n = A,T,C or G
gactgaggtggggtctttctatggtctggtgagtcatcctgacctagggatnacagctccgcatatacgctggtgacgccatcgnatggaccggtgtggaatttgctctacaaagaagtgatgaactgcggcaagttgnggcaaaaggcttgctatgaattcgaacagactggttacagaatgaaaaagtctcaaaacacaacgacagtnagagtgatctttttgttccagacaaactcagacatgaatggattttcttcattgaatttccaggaagtcaaacaaaaagacctgtacattccgagccagccaggagtcgaacctggaatcttctgatccgtagtcagacgcgttatccattgcgccactggccctgtacacgtngnttatnntccgaccccacatactttcctaaacttcgatngctncaggaggnctcacctgtcgtggctcngcatgtgngcctttatgagaatatgtcgat

SEQ ID NO: 665 - DNA, 153 bp, Homo sapiens
  misc_feature (1)...(153): n = A,T,C or G
gttttgaggagcacgaagaacaatcgctttgaatgctccagcacaaggcttatcatnngtgtaccctagactggcctnaaactggtnctgtaaaccaggcgtgacctgtcaactcacaaagatatgcctgcctctgcctccggagtgctggga

SEQ ID NO: 666 - DNA, 167 bp, Homo sapiens
  misc_feature (1)...(167): n = A,T,C or G
ctaagaagatgggcacatgcctacacaacacagncnatatggatacattnaccagctgcaaatgaggannnacacatanagcagaanactntacngcaaaggagtcngcagacagtttgtntatngcttggcccactncagtgatactattacaacgtgtgcgcgcc

SEQ ID NO: 667 - DNA, 152 bp, Homo sapiens
  misc_feature (1)...(152): n = A,T,C or G
aaggatcctagaagcagttgcttgggncntgagtaggnggccatgntgacngnntggataatcagcaggntatgatcaaaagtgcagtggtcggataagngcagancaccccnaatgacaggattanatggctgantcaaggtgtttccaga

SEQ ID NO: 668 - DNA, 372 bp, Homo sapiens
  misc_feature (1)...(372): n = A,T,C or G
catgtgagctgacaaggtcccagatgtganagtaccaagcctcatatctaggtatgtnantgncatntgnacggncnncatctgaaganacgtnagaggacccnanncagggctcctngcaacccanncnntctgnttaaggtacattgcagttaaaacccgtgcctccaacctcanncttnacctttatngactctnctttatntncattgnccaacacagaggcaatganttctgtccaggcagccagagtgccacactctgaggacttgaagatctatgacggagtgttgttttgctttctgttcctagcgtctacatgaaatgcttatggcagctccaganntgaaaanattgacttttgcggctgat

SEQ ID NO: 669 - DNA, 157 bp, Homo sapiens
  misc_feature (1)...(157): n = A,T,C or G
gactgagggtgacagcgtaatgtgctatcctggcctgctggggnggttgcccaactctgtagtangcncnnnngaccntangaccatgcacggagngattgnganccgnatcacatcaaaaccacatacaacnggaatggcactagcgcatggaaaa

SEQ ID NO: 670 - DNA, 216 bp, Homo sapiens
gactgaggatgaaacccaaggcattgtgcgtactaaactccagctccaatgtggtgctcgctccatcctgcggtgctccatccccagcccggccattctcacacaactcacttctgttctggattgtgaattcctgaaggatccagacagggtgtacttcatccatccctgtacctctaacgttcaaatattcattattttgcacaataaaaaaaa

SEQ ID NO: 671 - DNA, 437 bp, Homo sapiens
  misc_feature (1)...(437): n = A,T,C or G
gcctcatatccgcaagtgaaaagcccatttctgaaaacatggatgcatttgaaaaagtgagaacaagactggaaacacagccacaggaagagtacgaagtcgtcaatgcagagattaaacatggcggctttgtttattatcaagaaggttgctgcttggttcgttccaaagacgaagaagctgacagngataattatgaagntttattcaacctggaagaacttaaattggatcancctttcattgattgcatcagagttgctcctgatgagaaatacgtggctgccaagataaggacggaggattctgaaacctccaccttantagttgtgaagctcagtgaccagcctgtantggangcntagttcccnaacgngnccagnttcnaatgggngaaggatgaagaagangaagatgtctnattctacaccttccaa

SEQ ID NO: 672 - DNA, 236 bp, Homo sapiens
  misc_feature (1)...(236): n = A,T,C or G
ggtggcagcaccacggctggncgctgnccngnagncnnggcnncntggatttnctcttgatnccncttgganntagnagattgacatactcaagnngaggtattntctgtatggcgcacatgtatgtgctcccaaatgaaataattagatgtacacattcatattataaatttgggttcgttgtgtagactttgatagattaaagatcaatcactaattgttgaaagcaaaaaaaa

SEQ ID NO: 673 - DNA, 101 bp, Homo sapiens
tgatgattcctgataatatgaaatctctctccccagcctgaggaaaagacaccactcaagtttattttccagactataaataaaggaagtatgacatcaaa

SEQ ID NO: 674 - DNA, 172 bp, Homo sapiens
  misc_feature (1)...(172): n = A,T,C or G
agtcagcaaccccatgcatcggnctgcatgagtggagagagaggaggtgctgagtgataaaacatgcacagaggatacaatgccnttgggctggagggggaggcacagagntncagngttgncnagaatgcatacccnctagcacaagccgtatacacatatgcactatccg

SEQ ID NO: 675 - DNA, 117 bp, Homo sapiens
  misc_feature (1)...(117): n = A,T,C or G
gcgacacgacccttgagangacagcntntatttgattgnctncagtactgngatngaaaggacacgactctatggtgaggactgatggacntncattattctgagaaaagaaactac

SEQ ID NO: 676 - DNA, 377 bp, Homo sapiens
  misc_feature (1)...(377): n = A,T,C or G
gaggtctgtggagacaagagaagtttacagcacattaaggagacaggaaatgagtctgggggagcaaagcattgcagtggaagtatctggaaatgcctggcagggctctcggagtgcagcgggaccttggggctgggacttcagggtccttcggagaggagggaaggagggacacctccaaagacaggcctgttgccttgnttcattttgattgtagacaacaaagggcaactgaagattctttagaatgtgccgttatgaccctggatctgaaggctaaggagagaggacagacaaggcttggtgttaatgtgtaccgcagttctttactggatgctggaatacctgtcaagaaaagactcaggaagagtggatgg

SEQ ID NO: 677 - DNA, 122 bp, Homo sapiens
  misc_feature (1)...(122): n = A,T,C or G
gactgaggagctggcagaacaatggccncctctaggaccagcagggctactgtgcaccaagcaccagagggtgactttcacttnacaaactntttggaccatacnactataatacattaaaa

SEQ ID NO: 678 - DNA, 189 bp, Homo sapiens
  misc_feature (1)...(189): n = A,T,C or G
ctttcagtgtttgaggtactcaggnaggacaccacctcaccgtgggnactcacctttctgctctcagcggctcctcactntgtgctaccctaatacttgcctactagagggggccaggncnaggcctcttggggtccagccatggacaacccatggcttgacacantggagagaacccttagtttattg

SEQ ID NO: 679 - DNA, 304 bp, Homo sapiens
  misc_feature (1)...(304): n = A,T,C or G
atgtgcgtgtgtgtaaggggtggtgcgcctcgaacgctctgctccgcccgctccgtcctttccagagaaacgtactcgtaatggggtgacctaattacatcgcaatggaactcgctggtagccactcggagcaccgggtttcataacagacccggcggcctcgaatgctgggaagaaacgtgcgaggcctgggcggtgcggcccgcgatttncgcccgggtctccactgnagcacgcgagccggtgcgggtgggaggcagncagacctaanagtaaataaacacatagcttcgtggctttaaaa

SEQ ID NO: 680 - DNA, 248 bp, Homo sapiens
  misc_feature (1)...(248): n = A,T,C or G
tcctgagaagctgactacctgtggactgccagactactgctaacaactgnnaacaatgcatcaagaagcctgtggactggcagggggtgggggggatgnaccttacccnttanntgnntgnananttngtactcaancgtagcccctgcaancaggagcattgcccananatgccttcacttattgctgctgttgttttcactcaatcaaggtcgtgcaccatttttgctatttttaaataaaaaaaa

SEQ ID NO: 681 - DNA, 162 bp, Homo sapiens
  misc_feature (1)...(162): n = A,T,C or G
agggctttttatgcccangacaggagaaccnctttgntgaacgctgncagaacncttgaaacctgnctgtggatgccgtgtgagcagccgcctnccgctcccgctgccgngccttccccgccatgatggnctgtgagctggaataaacccttcctccacgaa

SEQ ID NO: 682 - DNA, 182 bp, Homo sapiens
  misc_feature (1)...(182): n = A,T,C or G
tctgaagggaagaacagccatganangagctgtcagcttctgaggaaaaggcctgtgccagtgngcagtggntttgtggcttgangtttcttaggcactagatggcgnagctaccttattgtacnntgtgnctgantcctcattgggaagatcacnctcttacgtgcacctgaggaccatcg

SEQ ID NO: 683 - DNA, 304 bp, Homo sapiens
actgaggccctccccgaaacctcatctcctaatcccttcagacctctctggaccctggtggccaggacctcggtcctatgccagctgcagtcatgtttgacagacaaaagcaaaacaggaaaacgacttctgcagtcgactgaagaatggggtttatttgtctcaaagtgcacacaagagagccgtggtggtggtctgcatagacacagagccatggcttgtaagtaagacactgtctgaacacatgggctccagactgcgtcatttgtaccatgcgatcaataaatgctttggaagaaaaatg

SEQ ID NO: 684 - DNA, 158 bp, Homo sapiens
tggtattctgtattagaataatttaacatctacgtggaaatgctgaagtaagaaaccactacaagaaaataagagaatttccagaatccatctggcttttataaggcgatggagaataaaccagaagccaaggtcacagatggggatgaagaagggaa

SEQ ID NO: 685 - DNA, 117 bp, Homo sapiens
  misc_feature (1)...(117): n = A,T,C or G
catgcatgtggtccacagnacatgacttgccagcgcgagcatgcacatgcgcaccccccaccacacagnagtagagagagagagagagagagaggaagatncaggtatccagggtat

SEQ ID NO: 686 - DNA, 249 bp, Homo sapiens
  misc_feature (1)...(249): n = A,T,C or G
ggtaaccgttaaaagaagcacttagggtagnncctagtccagggccttgggaatccagacaaacacaaaagggtgaagacacagaaatcagacaagtaagtacaaggcaaggagaaagttctggaacagatcatcactctcaagcctcagacgtgcacagactntcagctttccagcatctatcacccccaaaatgggaaactttntgccccttggcctgcacttntgntngtaaaaggaaccttgggc

SEQ ID NO: 687 - DNA, 398 bp, Homo sapiens
  misc_feature (1)...(398): n = A,T,C or G
agctgcgcgccttcgcagctcgccgcccactntggnccggttctgngccggcgcggggccctctangacgcgcgggggatttgtgagacgcatgcgtagtgcgcggccggccgcttcgctgtcgctcgggttccgccgttgccacctccctacgggcaagtgcgagaggggagccgagggccgccgccgtcgccgccgccgncaccatggggggaactgaggcagggaggcaagaaggcgtatggccaaggtcacattgatatggcttgggcgctggaccccatccggtgactccggagtctcgatggaatctggttcccactgntcaagtctttgcctagccagttcccctacacttttgaaccgtctgntancagcttcttcctgcttaagatgaa

SEQ ID NO: 688 - DNA, 101 bp, Homo sapiens
gaggaaccaggtgccttctgggaggaaatgaaccaagagtctttggaacagcggtagaaaaagttcagaaggaaaactgcagttgatcggaaaaaaaaaaa

SEQ ID NO: 689 - DNA, 174 bp, Homo sapiens
  misc_feature (1)...(174): n = A,T,C or G
agaataccaggcaaagcccctnctgnatgggggtcccaagggtaaagccgtactaagaccatggggcaagggaaatctgttagtttcttcatctaccaaatggaggttgagggcttgggactgggttntgtcgccacacagnataagccacgtgtggtagagcacacctttgct

SEQ ID NO: 690 - DNA, 174 bp, Homo sapiens
  misc_feature (1)...(174): n = A,T,C or G
tgattccaccatgggngtntnagggacccaatgcaggtcaccagnctcgttggcaagcaccntancccactgaggcanggcaccanccccttatntgntactttactaccattnattaaaaaggagttatttctctggttgcccaggaatctttttgncaaggaccggaccctt

SEQ ID NO: 691 - DNA, 506 bp, Homo sapiens
  misc_feature (1)...(506): n = A,T,C or G
actgaggtgctcgcgctnntttatcatncccggagccgggcagccgnctgaanagcgcacaanatatatgtacacataagctatgctaccatatagcctgcactgctnacccattaagtgtctgctactatngctacagtnnatttaggaaanatagaggcttaanatgtganactttattgnnagnanatngatacaccgtccgncaataacaaangcgagnntatatcggcatctaacatactggcattctggatnctgagccatgnccgcttatgagtttncaggantaaatncagnatttagnanccatactaccacaggacgggcagagtggctctgaagcacagcacctgcttagcatgcataggagngcctgnctgtattnncaacactgcnaaaganaactgnnaaacctattatgnggngtgaggngnntcacacttatctataacccaacatttaggagtctgaagacntangctggacgttcatggccggctttg

SEQ ID NO: 692 - DNA, 387 bp, Homo sapiens
  misc_feature (1)...(387): n = A,T,C or G
ccataccattatgttccgtgaaaaanactctttnnccngagtgctcancncatagcatgagaanagaacagcgaacacataagtcnngggctgantcagaacttggacctcctatctaatggccgggaagtgcccagganggcatatccatcaacaccaggtcttctgacataaacnatgggcatgntcgctcagctgnntgctgtactgacctgnnnncctacagaagaaaaagcgaggcatgantgcgcctgcanatacacaggactcaaagcnccttggntgaagatgagtggggaattatctcaatcattacntcatgaatntanagagagctggntgctgtactgccctgtcagcctacagaagaaaaagcaaggctgtctt

SEQ ID NO: 693 - DNA, 217 bp, Homo sapiens
  misc_feature (1)...(217): n = A,T,C or G
tccggggtggtgatgatacagnagtctagtccgctgnctcnncacatgagctttccaattagaagatctgcntctattatcacananaggaggacccgctcctannnctcngtnctntggnaggaaggcattgaacgatggggccatgggacaggggccgcccttctggaacatctattcctttgcccagatnctgatnggaaaatgctcacttcgt

SEQ ID NO: 694 - DNA, 330 bp, Homo sapiens
  misc_feature (1)...(330): n = A,T,C or G
tggtccggagtttgtgaagcctgtgccacccagccaacggtcattggtacaaatgaggcacagccttaaacaggacaccatcgaaaggagattttagaatgagctagtctgaatctcggtgacctggagctagtggggtccagagatagactgaaaagggcagccaggaacttcaggggagggagtgcgggacttgtttttcaagtatggtaatgnttattcggctgtgaaaggctgtcagaaacacaccctactgagctaatgcttaaaatgcatgcagtgtcttatgtgtataaattacccctgggtaaaatgacttaaaaaaaaaaa

SEQ ID NO: 695 - DNA, 263 bp, Homo sapiens
gactgagcattgtctgtccggtccagagcatccatgcaagagccgcaagagccaggaggccacggatggatctgttcagtctcactgacccactggcccctcctacaaaaacccaacctggaaccttggtcagcttcaaccgaacgaatgcttgcaagatgatggatgagaaaatggggtgggagaggaaaggacatgcagctgtgacctggggacttcaactggttcagtcaaataaaaggctgtactcccaaaaaaaaaaa

SEQ ID NO: 696 - DNA, 392 bp, Homo sapiens
gtttgaggggcaccactgggcacgtgttgactcatctgacaggaaagtcagtggtaagccggaagagataggcatcgccctcatcacagcctcctccgtgcgatgtctgggcccggggccaggctcaataaccatgagagagtcacctgacagctggaagaaagctgagccacagatacagatctgcaaaggtctcagaaccctggcagcaagcctcattgagtcccactaggactgtgtacatgtgtgaatggatggactggctttggaagacaaggcctctctatagcctagatggcttggaacttactatgtagaccagcctgacctttgatcttgaattcaattttttttttaattttttatttggtgggaaagggggtgagaaaagg

SEQ ID NO: 697 - DNA, 430 bp, Homo sapiens
  misc_feature (1)...(430): n = A,T,C or G
tatactcattccagtatggagacagtgacagacatattctnatttctcanaaangnactaagtctgtcacgttgaagaatgactgatagcactnggctgccnatggcaaactggtgagctttagcatnctgnnaactntgcacataanactgtgngctggacagcctnccancacttcanttttntgagganantggctggataataatcaatgttacgttacatgaagctatccagtgatgtcnnccagcatcanaagagcagcacaggacngccancatcatnatccaacccnccaacatcatccaacccgncaacatnatccaacccgncnacatcatncaacnngntancatcatccancctgccancatnatccaaacccgntnaaatgctcctttctnaactacctggctgcagagagcaatct

SEQ ID NO: 698 - DNA, 293 bp, Homo sapiens
  misc_feature (1)...(293): n = A,T,C or G
tcccaacaggaagcgagnatggctngtaccaccacacccnactgcatngtntaccttgancgaactgacctttaaaagaggacttgtngctcaaggatctctcctttagctgagagttctctctcctgagagctggnctcatnactctgnccancactgnagcacaaatgtcctctttaaaaccactccagcactaaagccatgtncacttgatcanncagtctagctngaatccttggctactccttanctggctccctgtnatttacaatatccacccctttaaattctaa

SEQ ID NO: 699 - DNA, 453 bp, Homo sapiens
  misc_feature (1)...(453): n = A,T,C or G
gtcctggcgctgactcagctcatggttgcttcatgctgcctgctgcaggcatactcctagctcttgactccgcagcagcagcccggccacttgaaagcctgcaggatcccagaatgccaacaggcagcttctgaaacacggactcaggcagaagagccaagccctggagagaagccagggaactttttatgtgggtaaacagttagatatggcacaaggtccctctggtaataccaaattcaaagcctgcanagccgctattgtagctggagtgggtgtccttgggacagtgacaggaggctgttggaatagcaggatgctgggctcaggccctgcccaaaccctgccactttaagttcgcacatgctgngacacttgacctttccactggggtgctaatgtgcaagactacgctgttagctctgatttcctttccctgttccttggacacca

SEQ ID NO: 700 - DNA, 481 bp, Homo sapiens
  misc_feature (1)...(481): n = A,T,C or G
gactgaggtggcagacgccacagnggctgggccnctcccacaccantcatggtcccctcttccccgnngactctggctgtgtcaagctgacnnatcctatccagggcagtgtacagcctccgcgccccaagggttccaagcagaggatgaatttgtggagacacctgccnncgctggcctacngnagnctgctcccttgtangccctnagacggnaancacagngattnttgtggngnccagatgggtttngantactgctgangntgcgtgnctctattncttgacnccnctgtggactnaacacacattcattgnncaccctttgaanaccggnanttgngtagagtactggggaaacacagtagcaggattgccatcacagtctctcaccctagattatgaaaaagcagagacaggaagatcatgagttcaaggctattcagggtataagtagcatgacatcctcaaaaaaataaata

SEQ ID NO: 701 - DNA, 138 bp, Homo sapiens
  misc_feature (1)...(138): n = A,T,C or G
aattgggggaattaaaaccananaacccttggccttttggggcctttttggggnaaaggggangggttttnccccccaaaantgggggggggaaaaacccttccaatttaagtttaaggttttcccccctttggttgg

SEQ ID NO: 702 - DNA, 498 bp, Homo sapiens
  misc_feature (1)...(498): n = A,T,C or G
gactgagggcggacgcacaacagnaaacgcccccgccgcgacctatcagcgattgccgcacacctctgccttggccaatccacagcggtcttgcagttccaccccttacctagggtgtggggaagctggggcgccccgtgcccaacctggggagtgtccagagcctgttcctcccccagcacacccccgcggtgtccttcagctccaaactaaggaaaacaaatgccagcctcctccctctgacccacatgtctcaactctatgccgccttacagcggcagccactgtcactattgcactggcaaagagcaaaactcctctcccctaagggccaagaataaagcaggctcttttgcgcctccttcattatnttacagatgaccctttaattcttcccagngagcattttaattagcacagaggtgaagcggaagtgcgctccctggagacaggagntggtgtctctcgngcctgctgcaaggcctctgggagatagag

SEQ ID NO: 703 - DNA, 420 bp, Homo sapiens
  misc_feature (1)...(420): n = A,T,C or G
ccacagacgccagcattagaggatgtagntgcctggagccnntctgggngacgaannaccnangctncgntcctccggnagctgnggctgttggtttacactgattaaagaactttagaacaaatcaccgtcaagagagagctagaatgtactaaggaaacgctttgatacagactgaatccatgttaagggaggagagccacattgaaatgtcttagccacanctatacatagtttgtggcttttgatggtgcattacacaaaggatttaaaacattaaaaatgntttcataggggcctggagagatggcntctcgttgagagcactgncatgttctttnaagaggccntggnttcggtccccancncctccataacgtcccagagccccanttctgtggcatccagtgattttttttt

SEQ ID NO: 704 - DNA, 140 bp, Homo sapiens
  misc_feature (1)...(140): n = A,T,C or G
ataaaatcaatgcgtnntgttcttcttctttgattcagntcaagtntgnnttcacaatatgtacagcaggagaataagaacagcattcccgggctggtgagatggcgtcantgagnaagagcacccgactgctcttagga

SEQ ID NO: 705 - DNA, 237 bp, Homo sapiens
  misc_feature (1)...(237): n = A,T,C or G
actcttgggcgaccantcgttggggtcccgnaaggcccntgacctcatngncgccacangacttactgttcntgctgntagctatgcagaannctggctngagggacatcacangctttggttcaatctttgcccttncccccaccttttgggaagaagccagaagggaaccttcattcaancatttttccaagcctggggcgggggggccatttggggccaattccccaagggccc

SEQ ID NO: 706 - DNA, 132 bp, Homo sapiens
  misc_feature (1)...(132): n = A,T,C or G
gccggacttgaaaaggttcatgcgggnatatnaaaaccgntcaagnagggcaggtnaagatggagtgagcacacanagcaccatgccaggagccagaacgcgggatgcaggcgnnnggatgcaggcgcccac

SEQ ID NO: 707 - DNA, 162 bp, Homo sapiens
  misc_feature (1)...(162): n = A,T,C or G
tagacatgtacccacatatggaacatcctgatactagagaacccagnccactagtanngccantanacgcagaaactgtgcgaatctnaanaccatgagggcacntgnntggaccacataagcatcctcaggacanggatggngcntgatgctgatggagca

SEQ ID NO: 708 - DNA, 165 bp, Homo sapiens
  misc_feature (1)...(165): n = A,T,C or G
acgattttggggacctcgggccgntttnggggggacccaggcccnaacacgagagggcgggaccagnaaagtttgnacgggcgggaaaccggntaccnangaagacctagggaatcccagaaggnnggcnnaggggccaacagcaggggcaaggcggaggccagg

SEQ ID NO: 709 - DNA, 297 bp, Homo sapiens
gagctctttccatcacatttggcaccctgaatgatctgctgaaacagaaatccatttctttttgattattggagaattcatttgtaatcatcagtttggtttaaagaacacagcacggaagacagaatttacatcgacatcacaaggctgctgacttgaggatgcttggaatgaagaacagctgaagtgttccgtataagactcacgggaagatctgccctagacgcttcctgctgcgtaccctgacccaccctactcccaagaaagacaagccgccacaaagtaccaggttacagt

SEQ ID NO: 710 - DNA, 281 bp, Homo sapiens
  misc_feature (1)...(281): n = A,T,C or G
actgaggcatcacaccttctaatttcctgcctaagctcactggccattgtattgaccggagaanggtttacacagtgcacaagagattanctacagaacccatggccaaagtttgcagcatccggatcttggggtgcaggggacaccacctgcggagacctgtcacctgcaagagaggctgaaaatgcggatctcttgcacntataattctgattccgcccccgagccctgtgatacacagcggccaacccaagaacaaacgggttctaaaaaataataaa

SEQ ID NO: 711 - DNA, 368 bp, Homo sapiens
  misc_feature (1)...(368): n = A,T,C or G
cacgagcacggatgacccgagcngggnccgctaccgcatggaccactagngntnacgagacatgatgcacgcntccctgacgaccttanatcctgcagccangacctggagcctgaccccntctggccatctgnggctnaggnnacananctagtgcgtncctccccntgaagntcaaacaggccagtcccagaancccaggaggggagggcctaanagctncttacnaaacgaaagtgtgaagaatccttagagtctnttancgntcttcctgcnggagaagagntgaagcccaaacagactcggccctgagactnaggaggggaggccctaggcnctacnacctaccctaatgtattaaaccgagg

SEQ ID NO: 712 - DNA, 110 bp, Homo sapiens
  misc_feature (1)...(110): n = A,T,C or G
tcgcggcagcggtgttcctacccnagaaccgnaagcaaacttatctagacggnggcggncancntgctntagggtntcngctcctaccagancgcactatatccctcgct

SEQ ID NO: 713 - DNA, 418 bp, Homo sapiens
  misc_feature (1)...(418): n = A,T,C or G
ccccaaacttttgggggttnncctttttttttttttnaanccctttaaaaaaaggggnaacccaaaaaagggggtttcccaaaagggtttcccgttttcccccggttggnccaaaggggcccccaacccccaaggggcctttagggggaaggggggccggggccaaaggaactttccaagncnttggaccccactttgggttggttggtttgggtnaaaagnattggaaccatttcccattggnaaaccaangggggccaanccggaaagnaaggaaaagnaaccccccaggggggnaggccgnaaacaaagggaaaggccaagccttttnttgggnaaanaaattttgnaaaccgnaaaaaaaagcccccccgaagttncccttaactttggcctttgggggggggaaaaaaaaaaa

SEQ ID NO: 714 - DNA, 139 bp, Homo sapiens
  misc_feature (1)...(139): n = A,T,C or G
gagctgcggaagatgtcggacagcgaagtcagcancttctccgaggaggaggacagcgagcgcagcagcgaggcggaggaggccgaggttgaggaagaccagcgaagtgctgcaggcagtgaaaaagaggaggagcctg

SEQ ID NO: 715 - DNA, 142 bp, Homo sapiens
  misc_feature (1)...(142): n = A,T,C or G
actgaggcacttctgggcagctggtgaggcactgctgcattctgggcagctggatgttgcttttcacactgaatgaacagacgatagaaatggtanggggtctctgacnctnacatgcttcttcccactaggaaaaaaaaaa

SEQ ID NO: 716 - DNA, 189 bp, Homo sapiens
  misc_feature (1)...(189): n = A,T,C or G
cgtagcatggttggtaaacagggcctgnccagncgncctgggtggaggagaaaccnnaggatcccaaagctttnttcttcgtnagagaaaacgtnanggcccacacaagccttccaagatcaaaggctnggatnagggaggntnnccataagaggattattgcctttcnncaggcttagccagggctct

SEQ ID NO: 717 - DNA, 337 bp, Homo sapiens
  misc_feature (1)...(337): n = A,T,C or G
gactgagaccccagcaggctgggaagcattgtcaattgtcacggngccgcacanaagttaatcattcaaggcttgccacccaccctctccagggagagatgcctgaagctaacgggaaccgcaaaggcacaacacaccatgagccgtcatcgncacaggcagagtgcctgacgctgggtgagacagggcctggacctggaggccaaatgatgagtgggccccaagtggatgccagccagggcctgaaggaagaagttttccctccagctccaatgtcttcagcaatagcacccctcggcaagacgatcgcaaagattaaaggaggggacgaagggga

SEQ ID NO: 718 - DNA, 254 bp, Homo sapiens
  misc_feature (1)...(254): n = A,T,C or G
agcagaaagacaacatcataagccgngtgccgtgggaggacactagcagaggagatgaccagcctcacacagcaaagggagggggttctgagagaaatcaactnagcctggggacntgctgngctcagngccaaacgaanangagtatttaacgccgtcgttgggacagtgnagntggtaccactcctcangccgtncagacnccaccctgggnggataggaagagcntgggangcgcttgagtgctgtgacta

SEQ ID NO: 719 - DNA, 122 bp, Homo sapiens
  misc_feature (1)...(122): n = A,T,C or G
taggggtatataaggtantccattacaggaggagaggggaanncatgtagggtanntggggaagnngaactnaggagngtcngggnaagagcagtcagtcgcacattaatcaatgatccgat

SEQ ID NO: 720 - DNA, 160 bp, Homo sapiens
  misc_feature (1)...(160): n = A,T,C or G
tgcgtgtatcttcttcgagtctcgttatttcagtncaacacccgtgcatggcttctgctcactggggaagttgctgcngggggtaggagnganacctnggttgtncaagcccctgggggcagaanatgggcttcncttcctctcttgcttggtggccagg

SEQ ID NO: 721 - DNA, 108 bp, Homo sapiens
  misc_feature (1)...(108): n = A,T,C or G
gtggtaacctgtaggagncacacacgtgcgccattgtntacgtggaccagagattatggccngcggtaatngngnnccctacccnttccttnataacctggtgtcaca

SEQ ID NO: 722 - DNA, 147 bp, Homo sapiens
  misc_feature (1)...(147): n = A,T,C or G
gccacggctggaacccagaggagccacacacggggcaccntccnactggaccagagatnatncggncgngaatccgganacccctcccncttccttcanaacaagggcngcaacaanaaaacctgagccntgaccagaaaaaaaaaa

SEQ ID NO: 723 - DNA, 138 bp, Homo sapiens
  misc_feature (1)...(138): n = A,T,C or G
cgacgactcaataggaggaaggnnattctccccctgccccccaaactccccctctgtgttggagattgaaaccaagatcttgttcatgatagctaggctttnncactggnctgcaaagccaaagcataaaacaaaaaa

SEQ ID NO: 724 - DNA, 162 bp, Homo sapiens
  misc_feature (1)...(162): n = A,T,C or G
attttgcggtaacccncatgcagctacttnggntaccctacancngccggcggctacnctncagctgcaccaggtangtaggaccctggggaggngctggataccctnctcccagtaangcccgntattgggcatggataanngtagcgcaactatgcggcg

SEQ ID NO: 725 - DNA, 342 bp, Homo sapiens
  misc_feature (1)...(342): n = A,T,C or G
gactgagatcccaccttcactgccgaactgttgnngaagacggnngcggtcttgncctancngnatcnctagctcangccctcctttntnaaggctcccagatgtctacagactcttacctnagaggngcatnttgttnngtgtttgtgagacaggatcgngctntgtngcctgannttacagagccttcttcactnannaaatgctgggattataancntgacntnaaangagcattttgtttgtgttttgagacaggatcgtgctctgtagcctgaatttacagagccttctccacttaataaatgctgggattataagcaagcaccttaaaaaaaaaaa

SEQ ID NO: 726 - DNA, 238 bp, Homo sapiens
  misc_feature (1)...(238): n = A,T,C or G
ccccccccccttggggggggtttnccccccctttggtttcccaaaaccttggccaagttgggctttggaacccaggcccttaacccccaacccttggtnggccttaccggcccttttccttggtgggggcccttcccccccctttttttttggtggggaaccccccgtggacggtgggggtttcagtnccaggcccaggagaaagnaaaaacnttttgattgcttagccggtcgcaaa

SEQ ID NO: 727 - DNA, 476 bp, Homo sapiens
  misc_feature (1)...(476): n = A,T,C or G
ggaggctgatatcatccacngagtcatgaacctgcttatnngcacgctggaagagtcaacacgaacagatcagcgngtgaaccagatctgcgccagtacatctggtgtgaatcaggatttanagggatagagnncacgnacatatcgtatcggatnacagnangcttttnactnancattagactcaccannnatganntnttcctgagaaggtttgtgaccantcagagnccaactccagtgagatngtgagaagactgnctnnancttntccnatgccaatgntgngaaggnngacaatacatctgaacnattcaacnggcnctnaaaancctgntggaccaaatcctgttcccagccngccacatgaccctgcgcagacagcancnaaganggttaacnaggcgttnataaatgggctgaaggagaccaaggatgccaggaacaagctggctgatcatctggccaaggttatg

SEQ ID NO: 728 - DNA, 271 bp, Homo sapiens
  misc_feature (1)...(271): n = A,T,C or G
ctatagcagctccagaangncttattaaacctnggtgtaagcggagattccatcnaagaatctacagctactacntttctgagacaaanaggctnnggcatggcatttnacnagtctgagagatgaggatcctgaacatancancgccacttttggaaganttggacatnanatctaanggacatttactacaanatccgcngngttctgatgccnnctgccatcgctgggntttaatagacaggnaggngagagacactcctgacttctg

SEQ ID NO: 729 - DNA, 118 bp, Homo sapiens
  misc_feature (1)...(118): n = A,T,C or G
gacccggaacacgcgggggcatgcagagaccaagatatangnagaggancnacagcccnatgacaccggacgncacagaccagagcngcacaacagagangagcagaaggcaagcacc

SEQ ID NO: 730 - DNA, 154 bp, Homo sapiens
  misc_feature (1)...(154): n = A,T,C or G
cgtggctgaaagaactgctgtgctgatacctgtcaagcagtatccaaaggtnatgtacaggggggntcnntcntgancnanagctgaancctgtcngaaagncnccggatggcagtgctgtctgcctagaaaagctgtcctgcgggattgaggt

SEQ ID NO: 731 - DNA, 134 bp, Homo sapiens
  misc_feature (1)...(134): n = A,T,C or G
caagaaaacttggggggcgaaaattttcgnaggttttngggcagcccgaaaaacngntcccatgcctgccaactgtnttgggggggcccagatattacancctgaaggtacccgcgtgccaagaggacgctccc

SEQ ID NO: 732 - DNA, 365 bp, Homo sapiens
  misc_feature (1)...(365): n = A,T,C or G
atgtgaggacttgggaagangctngcaggaagagtagccgaccccatccccacctggaggaggcagtccgctgctggatgaggacccgctgtcaatcacatgggaaccctgtccaggagccgactntggagctctgtccgtccagagcagacccatgcagacacatttacttgcttntgtgtgagatggggaaatgtctccgagctcattagggagagagcagtggtgaacattaacttcaggaaacacaagcttgggtatctcttgcgctcgctcggcatacactangatgctctcctgttcacagaagactntcnaagataaaaatattaaanaaagantnttaaaagacattaaaaaaaata

SEQ ID NO: 733 - DNA, 159 bp, Homo sapiens
tgaggacagcttgaggagagagcgaactcccatgtaacaaacacctcaagctgatttgatgctgaagtttgtctcaagtcacacactggtcattaatagtgccctgtcattcttttcatgtggaaattcaaacttgctagagctcttcaaaaaaaaaaa

SEQ ID NO: 734 - DNA, 490 bp, Homo sapiens
  misc_feature (1)...(490): n = A,T,C or G
tgagaagtctaccggatggttcccatagggcaggtgctccacatttgctgcttttcagttcatttacataatgggcccgcctccgctacaaagtgtctgctgtgattggagagaactgctttgagtgacagcggtttgactgacctgcggagttcacctanagacatgctgggctggttcccgtcacaacagacaggatacntggcaggatataagaatgtaattggttcctgataagcagaacctaaatttggagcggaaaagagaaaggctgtgaggtcagcagtgaggcctcacagatgctactctgagcgacactaaagaatggcgatgacctcggaataaacctgactggaaatagcattgcagtcaaccttcccatcaacctccacagcttacaaagaaggggataataacgcttcggatggtaactcaaaggaatatttgaggcttcagctgcagctcaacaaataaatgcgtctataacgag

SEQ ID NO: 735 - DNA, 223 bp, Homo sapiens
  misc_feature (1)...(223): n = A,T,C or G
cggctgttgggcaaatngcccgtctncgcctgtagcncgcacaataggancagaccagancgttgtcagcatgaaaggcgctgcccctgacagctgcctggagtgtcagcatnccgggagaaccgaaccagctgcctgaaagaccacatccaaagtcccattgtgcaagaaagcaaggcagtggctgcccttaggcgattgccgcccctgactcaggaacctc

SEQ ID NO: 736 - DNA, 106 bp, Homo sapiens
  misc_feature (1)...(106): n = A,T,C or G
atagaaagcacacacaaccttntcagcggttggnagagcacgncacttgtggtcgcaagnntcnaggtacgtgctagctacagcnattgtgccagaagagcagcct

SEQ ID NO: 737 - DNA, 163 bp, Homo sapiens
  misc_feature (1)...(163): n = A,T,C or G
ctaactccctggtggacaccgtggacaggagcggatgacncntacatgagntnctttntggagccnnntnccctggaaaaccacagactaatgccttctctctgatttattttcgaatgtaccattaaaaattaattcccccctttgtttttaaaaaaaaaaa

SEQ ID NO: 738 - DNA, 236 bp, Homo sapiens
  misc_feature (1)...(236): n = A,T,C or G
agagcacactttgcggattcangtcnaaacctgccatntggaaaggaaagaggancgattgataacacttctnagacattgggaacccaggagcagttttatcctcctggtttcaggctccggtggagtcgcgtcgtggccacttgcggatagcaaacatgcagaggtcggggtttgngggaaagggatattaactccatataaaagngaaggacaccgtgtggtctcccaagttc

SEQ ID NO: 739 - DNA, 145 bp, Homo sapiens
  misc_feature (1)...(145): n = A,T,C or G
tccgatgcccttcgcctggacggctgtgcacttggccaacatcgtgagcaggccccagggacccggggatttncccgnanctttctttgagggcgaacgcagaccccaccttgggggcccgaacgccgnccgtcggggggcccct

SEQ ID NO: 740 - DNA, 468 bp, Homo sapiens
  misc_feature (1)...(468): n = A,T,C or G
tgaggctctcctggctgctcctctcctctgtgtccacaaggtcattctcttgtctggatacctccacctgggactccctcaatgggattggaagtcctaccttcactctcctcccaattatagcccgatcagctcttcatcaaccaatcagaagtggcggggaacaatacacaggaaatgcttcaataataatgacaatgctaactctcagatctcagggcacagtagcagcatctgaatacacagcatacaaaactctcccccagagtcttgttcagcactacataaagcagtccagctggccagagaacttcaagtgttcttctttatctgccatcatctgctgtaggcgctctggagatctggtcagccttgagtacataacaccaccttgtctcaaagtattctgtaatactatctttgggaggacgttnccctatataaaacaatgagaataaattttactta

SEQ ID NO: 741 - DNA, 238 bp, Homo sapiens
gactgagatatggcatctgaaagaagaaaagacatacaaaatggacaattcaagagaggctatgaagagcctagccagtagatgaagagaacttgacacttatgaagaagctcctcctgcttgtcagctgccttgagtaaggaattagcatcatcataagccctgccttggtgatggtaaaaatttcctgtaacgatgctgtatagccttaaagcaataaagcatgctcaatgctcca

SEQ ID NO: 742 - DNA, 215 bp, Homo sapiens
actgaggaaacgtctgctctgctgagctgccattccgggacgacgttggaggaggtcaacgaggccccagctgcggggactctgctcaaatggaaactccattctctgctctctgactcagatccctcctgggtctctggtttactccatttccccccacttccctcctctggtctcattttaaatagaatccaccagcaatcagaaaaaaaaaa

SEQ ID NO: 743 - DNA, 163 bp, Homo sapiens
  misc_feature (1)...(163): n = A,T,C or G
actagtctttgaagaatgctgntgaacaccanaggaanaataacantgatnagacggcaacncgtggnagctnttgagttagagtccaaagaccntctgaagaggctatttccaacaggaggtcttgtcccttctaantngnacatacagggaatggctgcgg

SEQ ID NO: 744 - DNA, 164 bp, Homo sapiens
  misc_feature (1)...(164): n = A,T,C or G
tgcactgaaagatttcatcttatanagattngagtattcngacagcgctggattctatgatttncaaaaggaggtctctcctgagaaccgagagctgtggaagaaataaaaccaatttttttcttttaaaaagccacatantanaaccactaatgaaaaaaaaa

SEQ ID NO: 745 - DNA, 315 bp, Homo sapiens
  misc_feature (1)...(315): n = A,T,C or G
aacccgggacaccaagccccgagnagccgnaccngctntttagacnanccaagnanccccgaaggcccnctcaaaaagcccacaacaaaacagcccgcaggctnggccagggangacaggcgcncagaagcagaggccgcaaagaacgcncggaacggcaanngcancnanccagaaaccccgcaaacgcaannacgagagnnggcgaaggcnaacncgaagaaggccaagaacaaacgcaggagggacngcaaanccgaggcacngcanaggccaacanaagaaccacagcccaacggcagggagccaaaagag

SEQ ID NO: 746 - DNA, 466 bp, Homo sapiens
  misc_feature (1)...(466): n = A,T,C or G
aaaagcacggcaagctcattactttcttgcgaacattcatgaagtctcgcccaacaaaacagaagctaaagcagcggggcatcttgaaagagagagtattcggttgtgacttgggggagcacctcctcaattctgggtttgaagtgccccaggttcttcagagctgcacagcgttcatccgagaggtatggcattgtggatgggatatatcgtctctctggcgttgcctgcaatatncagagacttcgtcatgaatttgatcctgagcatgtccccgacctgacaaaagaaccttatgtccaagacatccattctgtgggctccctctgnaagctgtacttncgagaactcccaaaccctctgctcacctnccagntatacgagangtttctctgatgctgcctcagcagcaacggatgaagaacggttgataaaaatccatgatgtcatccagcaactccaaaac

SEQ ID NO: 747 - DNA, 133 bp, Homo sapiens
  misc_feature (1)...(133): n = A,T,C or G
gcattcttgaaataaangcngggactgccgtgatgatgctaatagngctttttnaanaatggcngaccgcctgcgccagaggcattcctgaaataaagcaaggacgccgtgtgagtnatatccagttactgac

SEQ ID NO: 748 - DNA, 273 bp, Homo sapiens
  misc_feature (1)...(273): n = A,T,C or G
ggagccaggattcatcactgncacaccacctctctgtctggagctgatgctcttggatgncccgtagngacaaatctactaagcagtgggctcacacgccatcttcngcaacttttgggcagccatgtgccttcctggggcaggagggaggaacaggtctcacagacccctgagtgtccaggnggntcaagatgagctntccngncgaccgncgaggtncangaagntgcccctgctggggcctagacacatgcacaagtgggatatccaggc

SEQ ID NO: 749 - DNA, 277 bp, Homo sapiens
  misc_feature (1)...(277): n = A,T,C or G
aagtaaccttgtagccagccangagaagatctgagaagcctgggcttggagtagcactttctgtgtagctccaagtgaaaggctgagtgtagatggagttctaacagcagagtgggaagaagagtgaagagtgaagtgatgaagaccgtggagaagattggatagagaatgcttgaagacgcntgcctgtttcccgagggtgatccgngagtgggtaggactggtttcaccatgangaggaaatgaacttcagcaggctggtgttggggatggatgg

SEQ ID NO: 750 - DNA, 136 bp, Homo sapiens
  misc_feature (1)...(136): n = A,T,C or G
ccaagttctggagaaatgagacacgtttgncctgngagtngaanacccaccatcgtaacatatgtataactactagggcacgtgctaaaactacccggatggtcagtcttanagcattgaacaggggaacaaggaa

SEQ ID NO: 751 - DNA, 206 bp, Homo sapiens
  misc_feature (1)...(206): n = A,T,C or G
tgaggcaagcgaatttcagctaagcaggcattccgctcaccaagttctaagagcaagccttcctgttgcagtgcagcttcaagctctgaaggatggcgttccaagaaaagggatgagaatgaactaaaataaatgtgtatcacaatagacaattacagtgaagntatcaaattccaacaaacttgaattttggagcaaaaaaaaaa

SEQ ID NO: 752 - DNA, 285 bp, Homo sapiens
  misc_feature (1)...(285): n = A,T,C or G
tttgaggtaccgaccctgctcttccactgaattctcgttcggtcgtgaattgnaaagggcctcaaagaaatcctttgctagataatgtgatcgcgaagggttgtggagcttggccctgaaactgacanagganggatctaccaaaagaagttagcacctaacctttcttaccccaccagcgaactgtanacgacattgaaaagggacctgcaagtgagcagtctttctcgactaacgctaaatgaactgtgctaaaatactgcgtatattcgaagttgataactg

SEQ ID NO: 753 - DNA, 279 bp, Homo sapiens
  misc_feature (1)...(279): n = A,T,C or G
gacggaagacttgtggagctcttcnaatnacncagcaattgaacaantgganantatnagagacacctgttcanacattttaaacaatntcgngatgngcctttganaactgctttacncgaagggttgtgctcacagngttgaaggcgttacccttcaaccagcgagggtgacctggctttacgaggactctgacgnaancnatngnctagtcngatgatngatccatgatgngatggntttgctgaacaggtgnncgaaaggtttgaaggtggcccc

SEQ ID NO: 754 - DNA, 112 bp, Homo sapiens
  misc_feature (1)...(112): n = A,T,C or G
gtaacagcgcgcggggcnncngtatatggtgcgatgacgtntaaatgcncataataggangggatgctttnntgaaggggaagaaangagccgatgaagactgctgactgtg

SEQ ID NO: 755 - DNA, 153 bp, Homo sapiens
  misc_feature (1)...(153): n = A,T,C or G
gattgagatctcacatagcccagntgacctcaagcttcagnggccaagaataacctnaattcctgcctccccccccccccccngnggggnggggggggggtgaataccatcgtanaggtaaatancaaattatcntctgggagaaaaaaaaaa

SEQ ID NO: 756 - DNA, 206 bp, Homo sapiens
gactgagataactcttctgagggaaggcagataccaacagaaaacaatgaggactcctgccactggtcttttgagtccactatcttggatttggatcccccaacttggcgagagttactgggccatcatcacccaggtagactgattccctacccacagaaagtgttgactaataaaggttgttttattttgtgcaaaaaaaaaaa

SEQ ID NO: 757 - DNA, 103 bp, Homo sapiens
  misc_feature (1)...(103): n = A,T,C or G
taacagtttcggaacgtgnatgggaaagcggccaacagggagcattgctttgacggnancccnatcactcnanaatgtncatgacaaccaccttctgcgtagc

SEQ ID NO: 758 - DNA, 370 bp, Homo sapiens
  misc_feature (1)...(370): n = A,T,C or G
ttccagtatgcctgagtaacatggggtcacactnagcagccncancatctanaaatgtatngatnctactgtnangaattnangaggtagncgcangaaccaatttccagggacccntaccagggaacgtncatgagtggcaantgntgtactcagacaaaaggcaaatgtgactcctctactcctntttggggatacattttgctaaggcaaagctggataaccanaagcgnaagaagatgcagcnngagagaaacagtggacncctctggggatcaagaggaagcaacagcccccagctctttccagnttgactgngattgcccatttttgtgaactttgtccagctttctaaaagccacacattggc

SEQ ID NO: 759 - DNA, 341 bp, Homo sapiens
  misc_feature (1)...(341): n = A,T,C or G
ggtatggcctcctgcntcctgcagacctggcggcctctcagtacatacggccccaatttggggttctgagtggctactggaaagccttgcaaaagagcacagagggcaggaccatggcatctagggcctctgaactgcccccaggatcagggcgcagcgtgacagcaggcattatnattgttgganatgagatccttaaggtgcgtctgnaacggaataggggaagagtgnggcattctattgncntggantttttacggtgaaaggagggaaaccggagtacgaatcccgtttnttgncaaagtcnggccctgnagtgagtcctaacacattggaggaaa

SEQ ID NO: 760 - DNA, 181 bp, Homo sapiens
  misc_feature (1)...(181): n = A,T,C or G
gcacgcagagtgaccacataggaactctgngcaggtggcaaggactgagagggtgtctttcttcctgctccttcaaccagccatactctggcttgggctgtggcttccttgtaggataaacctttgccagcctctgaccccttggctgtgttcatacacctgtaccttccaaaaaaaaaaa

SEQ ID NO: 761 - DNA, 325 bp, Homo sapiens
  misc_feature (1)...(325): n = A,T,C or G
gctttggaacgacagaggggcatnttgactngattagacaggttancatgntngacatctgtaatgacnataatgnttnccagnaaggntcgcggcctgactcgggaatctgtatgcccagatacatgccagaggggtgctgccatgacctnctggaanatacagagncnggtataacctctgncaagccgtntcatgttncactggggaagaangaatgttgngaggngagggctctgccgtccccaaagggannacgtgcgtggcanaatcaaggtctcancctgtnccaacnntgatanangnngacctttgatcccagtta

SEQ ID NO: 762 - DNA, 150 bp, Homo sapiens
ccatggaaaggtggaagaagagactgacttcatgaagttgtcctctggcctctacacaagtgctgtggtttgaatgattttacttacacacacagcatagaccgtttgtaagccaataaactcactgcatcaccaagttaaaaaaaaaaa

SEQ ID NO: 763 - DNA, 403 bp, Homo sapiens
  misc_feature (1)...(403): n = A,T,C or G
cctaagaagatgtgattttgtgccaaggngacaagggtctgacgtgtggnggctattgtngnggtcaatctgatngcatctggnatnaacgtanggctcacgcnacatgtgttnacctgggagggactttngagagntaaatnattngaagtgggaagacgacccacctttaacctgngccacacatgnaatgctgggagcctgtataaaggacanggaanaaggaaactctctggcacggtcattccttcactggcattagagcatacttcttcaggattctggtgtactgaaaagcagctgagacatccancctcacanactgaactactgggttcttaggctttctgttggtagaaagcccttgttggatgagctgnaccacagtctgtaagccattcta

SEQ ID NO: 764 - DNA, 213 bp, Homo sapiens
  misc_feature (1)...(213): n = A,T,C or G
gctcccaagccaggaggcgaagggcccatgttgtgccacctcagctcctgatcccaagaccaaggagctgccagacctgcgtcagcttctcactgtcggtgtgatttgccactgtgtgacctcttggaaaagaaaatccaaccgattttgatgattcaagaaagcagaaggcccaaccttcagtaaaaccacaggnntccgggaaaaaaaaat

SEQ ID NO: 765 - DNA, 115 bp, Homo sapiens
  misc_feature (1)...(115): n = A,T,C or G
tggtggaagatgagagaagtgagttcacancattggcttntgacctccattttcatgctggggtgcatncactaaaaatgtaataaaaagaacttatatattaaaattaaaaaaa

SEQ ID NO: 766 - DNA, 149 bp, Homo sapiens
  misc_feature (1)...(149): n = A,T,C or G
cccgggcccgctctccgcnggattttggggaacgggnacgggagtttagggggtnaacgaggcnaccagcaacacgaaacaccatggngtnctgtanacacccggaacactncngcacgaggaggagggagactttgaggaggaggaag

SEQ ID NO: 767 - DNA, 277 bp, Homo sapiens
  misc_feature (1)...(277): n = A,T,C or G
ccttggataggacatttactgnnggaactgagacagttttcctgtgcctgggggctggggatgtgtangtgaggactggcctaccgtgaagcgatggtttcttccccagcaccttgtaaagcgggtttggtggcatgagcctataatcccagctctcaggaggtagagacaggaagatcagaagctcaaaattgtctttggctttatagngaatttgaagccagtctgagctacacaataccctctctcaaaaagtaaataaaaagaatggacagtc

SEQ ID NO: 768 - DNA, 161 bp, Homo sapiens
  misc_feature (1)...(161): n = A,T,C or G
ggctgaagcttgtgtcanctacaggttttaaacactgttttggtaatactccgcatgaacaagatttatcacaanggaggaggaggagggaggaacnagangannnngagngnatncntcaaagatgcatgnnnaagatgctgtnctccctgaggcctgtt

SEQ ID NO: 769 - DNA, 340 bp, Homo sapiens
ctgaggtggggtctttcactactgtgcgatccggtgagccagagcagcccagggctgagtcctctgcggatggatggaagaccgcacggtcctttgctacctcagggtcaggcatgacagcccgagggatgtttgggaagaggtcaacactcacctcccacaggccatgctacctgttcagcggcaagcgaacatgcatccagcctgcctgcttgtgatactctctgggtgacaagtgccaggctcgccctccccagcggcccgcgagctgcctaagcgccaatttcggaagcaatcaaccctctattaaaatcaaatttataacccctaaaaaaaaaaa

SEQ ID NO: 770 - DNA, 225 bp, Homo sapiens
  misc_feature (1)...(225): n = A,T,C or G
ggagtcagaaggacagaagctggtggctcaacaccctggacaatggtcaggcagaatcgcttcaatccctggcaggnactgtccnatgaaangacnagnccngctggncaggacgntcctngcccacntngnataganattnattgaaaacctacatacactattaantcagcctntggacacattgtctcccattacangattnnaaatatacaaaatgtttgt

SEQ ID NO: 771 - DNA, 364 bp, Homo sapiens
  misc_feature (1)...(364): n = A,T,C or G
ggccccgctcagtgcagcgctgcgtggagctcgnctgacccntaccggncatccggggactcgcaggcncggtgactttctggacgctccactttnccactcgtgctttggatgcncgggntnncaagactgananttccccagaattngnattntactaaatganaacattgaaagatcnctgtccacctatcaccaccatctcatacaagaaggncatacgaaagaagggagaccatatacagcncanatgantgnggaatncttttaaaaattatggnnanagtttananaactgnnnnttnttttccnaaacttaaaaattatggncagagtttaaaaaactgnaattttttttccaaaa

SEQ ID NO: 772 - DNA, 158 bp, Homo sapiens
  misc_feature (1)...(158): n = A,T,C or G
caccccccccccccattannnggaannttgggggaccgcccncaaaatttggggggcaaaccaggaaagccgcgncaaangcggcagagccnaggtaggggngggngnacaccnncacgggaacgcaaacaacgaaagaacaaaaccacaggaccccg

SEQ ID NO: 773 - DNA, 203 bp, Homo sapiens
  misc_feature (1)...(203): n = A,T,C or G
cttctacactccagtctaacagcgtnccgctcactcgngcactacagagcaaacacgcngctaagctgnacctttgggagcaaagncggnggacagagnanaacctggatgggggcaggtagaaggagccngcccagctcagtncggtggngcttgcttgagntatcagcatnntntgagaccggaggcaggaggatcaaaga

SEQ ID NO: 774 - DNA, 509 bp, Homo sapiens
  misc_feature (1)...(509): n = A,T,C or G
ctgagatggtgaggatgaacatgatggcagaaacaatagaagagcaaacctctcccttcagcacgaagcaaagagaaaggatgtggaccagaggactaaggtctaccataatagcctgccccagtgtcccagctccatcaccgctcatgaatgccacacacccgcctgccataaagctgttagaaaacgggcatgtggggagacacnttcaaatataaactgtgcctgtccttttcccagagaatatcttcctcttccattttggctatttttcaacctacagtctctgtctctttgtaagacttctctttaaactcaggatattcttaacaaataatctatggatgacattttcttcatagtctttaattttgtcttttcaagcaatttgtattagaaatatcagcactacaaatcagtaatttgcatgcttgtagatctaaaaccttacagaaattttggaaatattttgtttattttttaaaaaataaagtgttgatttttttaaa

SEQ ID NO: 775 - DNA, 159 bp, Homo sapiens
  misc_feature (1)...(159): n = A,T,C or G
gactgaggtttgccctgtgnatcctgccctagcctcaggacanggtgaatcccaagcttgtctgctccttcgagtcacgtggaattttttttcaaaattccgaagcccagaacttaaccaggaccaattaaaccttaatttctgacagcaaaaaaaaaa

SEQ ID NO: 776 - DNA, 130 bp, Homo sapiens
  misc_feature (1)...(130): n = A,T,C or G
ggaagatgacgcctctcctgtttcnttgctttctttcgtnctaacncactccatncctcacactcnttatntagaagttgatgctccttgagaatttttacctggnacatttaaaagaatgtattcttta

SEQ ID NO: 777 - DNA, 107 bp, Homo sapiens
  misc_feature (1)...(107): n = A,T,C or G
caggcagaagcagtaagaagccacnctgaatccanattcaacttgagcctnaatgtctgcagatggatanctncagccttgcanaataaatccaactacatacaaaa

SEQ ID NO: 778 - DNA, 289 bp, Homo sapiens
  misc_feature (1)...(289): n = A,T,C or G
ggcccgtgggaagccattctttagctgggatattcaaccatgatttctggagttaagaacatcttccctgaagccctcccaagcctggaagctcccactcttcgtccctttatttgcttcatcgactccatacctgttttgtgntggcgntnggtgtaccttcatgcagtnggcatgtgattgtttntaaatagcnngaaccatggatcttattcaccactgtaatnctagggctaaaattactttttaccaagtcaattantgaataantanttgtggaaggaaaaaa

SEQ ID NO: 779 - DNA, 121 bp, Homo sapiens
aaaatcccctcctggaagccaaaggtcataaagaacatacgcacccctcgcctccggaagggaggggctaattatatccatcagaccacagggtggaggttaccgaccaccagagctcata

SEQ ID NO: 780 - DNA, 202 bp, Homo sapiens
  misc_feature (1)...(202): n = A,T,C or G
gactgagggtctcttcatgttactgcagtatggggtatncaacccataggncanctgcacntggnattacacgnggctancctttgnagcagccttcangtangcnggcacgtgagacaatnttntgnagncggtccctcctctatggcagtgatcaaaggctccttcaanaanggcacngacaagcagttaaaaaaagaaa

SEQ ID NO: 781 - DNA, 283 bp, Homo sapiens
  misc_feature (1)...(283): n = A,T,C or G
actgagtatctcttctacagttactgcttcctgcttgtgatacccaggaagcctttgggtccttgatgcctccattcaatttggctggaaatggatttgctattgataattgttacttcctaacatgtcatatagatagcctatatacaaaacacatgagaaatcaacaaatgatccatgataaaaaatacctactatgaaaaaacgagtatatgaccattattacttctaggnntgactaggagtnaanttcattaaaaatgtncatgcaatgaaaaaaaaa

SEQ ID NO: 782 - DNA, 288 bp, Homo sapiens
  misc_feature (1)...(288): n = A,T,C or G
actttggaagggtggttttaccagngncccgcgcctggcttcnnttgntccccaggaaggaagcacancagtntgacttaccccctggnatggaaggaaaaaaggccttgcccttttttggnnggccccacggcttaccttnggcntttgggcngggaagggangggttaacaaaannnggncnangggacccttttggnccccaaaaatttggngaaaaaggaaaancccgggaaaaacnangggggggggggggggggccccccaaaaacaaagggatccccccaa

SEQ ID NO: 783 - DNA, 107 bp, Homo sapiens
  misc_feature (1)...(107): n = A,T,C or G
gactgagatgccctgctggcngacttggaatctaccacctnccacatctncaaacggcgcagtgttcttgtcagaggagcccccctactcctacccaaaaaaaaaaa

SEQ ID NO: 784 - DNA, 121 bp, Homo sapiens
  misc_feature (1)...(121): n = A,T,C or G
gcatcatcataatcaccaccanaaccatcatcatgatnatgngtcctgcctgagtcttctntggtagtgccattangccttgnttaaanatgggctattattgttatcattaaaaaaaaaa

SEQ ID NO: 785 - DNA, 167 bp, Homo sapiens
  misc_feature (1)...(167): n = A,T,C or G
tggaggctggaagcgtntgtgaatgtggcatcgcaagagagcgaagtcacgcccctgcatgtggctgcagctcgtggcctggaacaacatgtggccctctacctgcagaacggtgcggacgtggctctgcgcaccagccagggagagacggcgctgaaaaaaaaaaa

SEQ ID NO: 786 - DNA, 103 bp, Homo sapiens
  misc_feature (1)...(103): n = A,T,C or G
ttggaacacagcctgaatccctgatctggatntnccangaagagccaaggnnanaaagtgattgttncatgggngcaggggcacctgcgcttcacagatacca

SEQ ID NO: 787 - DNA, 229 bp, Homo sapiens
  misc_feature (1)...(229): n = A,T,C or G
acttagaaaccttgggatttcttnggcctgnactgacctggnncttcgttcctgaagaccagncttgtcctggaactcacagananactgtctgcctntgttntgagagagctgnaattaanngaatgtaacacccaaaaaaaatanttgananggctgacctggnacttgttntgaaaacnagnctggcctggaacttgagaganttgnctgcctctgttatgagagg

SEQ ID NO: 788 - DNA, 113 bp, Homo sapiens
  misc_feature (1)...(113): n = A,T,C or G
tataagcgttgaagtgngctncctgtctatttggctgttatagaggctgaacagtcagttagtgggtgtataagtatgtaggatgatgtctgagtgaaaataaagcccatctg

SEQ ID NO: 789 - DNA, 145 bp, Homo sapiens
  misc_feature (1)...(145): n = A,T,C or G
gtctccagactgccgccggggcgtgagcatcagaacagcgatgacagnccctgacaaccgcttgcaaaaatcttcatctgtgttaacaactccttgaaggtcctaggcctggattagcatggnggaatctctggactctgtgagg

SEQ ID NO: 790 - DNA, 130 bp, Homo sapiens
  misc_feature (1)...(130): n = A,T,C or G
acttacatgtgagatatagangccctgacaactgggngacangnactgcacaatacgcttactnttctttccccatctatcacaggacaagagaattttaggntnaaccactcacagacgtttaactttt

SEQ ID NO: 791 - DNA, 239 bp, Homo sapiens
gaactgagatggtttccatttgcctcctttctagtaaggctgtggcagcctcccctgtgaaaataattatcagatcagactgacctagggagaaaacatctgtgcggccgtgaccatccctggacggcagagcctagaacatgatttctcctagctggggccttcctgctgcatgtggcttccctcacaacctcttgcagactgagcaagcctgtgtgggacccttttaaaaaaaaaaa

SEQ ID NO: 792 - DNA, 140 bp, Homo sapiens
  misc_feature (1)...(140): n = A,T,C or G
gactgaggggacgctcangagccggactgctgnccggagctgngcagaccttccggtgnntctctccatngccaccangcctntcaggctacnaacngnatacacagtagccagcaacttcttggatttaaaaaaaaaaa

SEQ ID NO: 793 - DNA, 266 bp, Homo sapiens
gactgagggaatggtaccttcatctggtgtgcttgaaattcctggtgtggggacagttggaattctactcagcgctgccaggcaagcagctggacggagaaccctgagggttctcagaggtctgttttctccctcacgtgggccagggccttaagcgagttgtcatgcttaaggatgaatcaggctgcttgtgaccatgttaacgattctaataaagtgtctggatgtctcttgggggtggggcccactagggtgaaaaaaaaaaa

SEQ ID NO: 794 - DNA, 133 bp, Homo sapiens
  misc_feature (1)...(133): n = A,T,C or G
gcagggctgaggtacggcggntgccagncacangcacgcnncattgttggtggcgcaaaggtggaccaggaaagtctcacttccctcatctttatgaagaggataataaacttcaccttcaaagataaaaaaa

SEQ ID NO: 795 - DNA, 479 bp, Homo sapiens
tgaaaacctttgtgggaagagacggggagaaaacaccacacagctgctccaaataaggtcccaagatgctgcacaccaacctggcaccacagcacatggatggggaacagttttgagacatggcttctctgtgtaaccctggctgcctggaactggctctatagaccaggttagcctcaaactcagatctatctgcctctgcccaggatggcagacctgcctgactatgtgccagaattaaaggtatagaaccatcacactgtctcctgattttttgaaatggaatgaggagacagctgggttgaagctatggatgcagctacctcagtcaaagggaaactggcagcatgctatctgtgctgcatgatcccagcagacactttcctcctgctaagtccacctgctgttttcaccagagcttgctcaggaagaaataagcatcacctgtcctcaaaacaaagcacggtctccctcaagaa

SEQ ID NO: 796 - DNA, 276 bp, Homo sapiens
  misc_feature (1)...(276): n = A,T,C or G
atttcacatgcaggacaccccagnantcctgccagcnggatgnagnnggtgggcctggcaggacaatttcaggcaccgtgtcccagagtacagngggccatgtgtatgntttgcctgtgttctgccccaaaagctncccatagcgagttagggacctccaccataactaaccggtacaacaccctacaggagacttttctctcccaggtgagagccacagaatctgagaacatgatccattcgatttctcattgctggacatagcatggaccaaca

SEQ ID NO: 797 - DNA, 133 bp, Homo sapiens
  misc_feature (1)...(133): n = A,T,C or G
gcacgtgtgaagccgctatgatctgtgagatcagcggttccttgatgccacacggtgaaggctgtantcttgngccatcaggctacgnctaatcctgactgaacatttttactcacactgtcggaccccacat

SEQ ID NO: 798 - DNA, 318 bp, Homo sapiens
actgagggatgagcgccttgcccctgttgatccaactctcgtgggcactgaggttttgtagcagagaagctgagaggcagctggtgctcctttaagagcagcttgcaccaatcacacagcccctggcttgctgtcggcttgatccgggaaggaggcggggcttctccaccagcgccagactccctgctgcaggtgcagggctccaagggcagcgccagttcatccgtttctgttgtctcaatgcagctgcttctttctaaatacaaaaacactgttttatgagttattaaatattactttcttatttaaaaaaaaaaa

SEQ ID NO: 799 - DNA, 129 bp, Homo sapiens
  misc_feature (1)...(129): n = A,T,C or G
acatagataggatgcagacagcagatgcacagatatcacnggtgcgctctggaagntttgagaatacattgaccaangncggnaatccccagcttctacacnaaagaatgctctggcagagggctctag

SEQ ID NO: 800 - DNA, 154 bp, Homo sapiens
  misc_feature (1)...(154): n = A,T,C or G
tctgggagaacatgggggctntcttacccaccaagccccagtactaacagatacataatacnagacagcataacgtcccacatttacagcctcagggatcattggggaagaggggcctggaaagagngtaagagccagatgaacagagaatttg

SEQ ID NO: 801 - DNA, 133 bp, Homo sapiens
  misc_feature (1)...(133): n = A,T,C or G
catctattgtgggcatggcactcatacnncctagtntatggnggctaancctnttcnaaccancncngncactatggnagaaaggacaaaaggaagcgtattnctgagcctgggaagaagtgcccaagacggc

SEQ ID NO: 802 - DNA, 242 bp, Homo sapiens
tgaggtggggtctttcagtaaacatctgggcagccacagcacttgcttcgttcttccttgtgtcgagaagacagagcgcctgaagtcgtaacccaaagaatgaattttacttgtgcatattgtgagccaacctggattctccattagtcctttgggccacaatcctgaatctgaatggctagcttaaggagacctgatgccggaataaaccttcacggcaaacgctttgaattaaaaaaaaa

SEQ ID NO: 803 - DNA, 203 bp, Homo sapiens
  misc_feature (1)...(203): n = A,T,C or G
acgaactcattcactgcngacgactntttgtttttgananngggtnttttnctnctcaaacttgnaagaaggtgagggactgggctccttggctgctctggctgctcgcgaaggcctcttcctcctcccgctgaagtctgaaattcaggggaaagactgtgaatgatctgggtcctctccaggttttcccagggtctagaaga

SEQ ID NO: 804 - DNA, 231 bp, Homo sapiens
  misc_feature (1)...(231): n = A,T,C or G
tgacagcaccgggcatgcatgtggtatgcagacatnnttggaggcanganttttatacacacanaatggacacattnttttaaatnacaaanttgggccgnagagatggntcatcattgaagattgntnttncagaggtgntgacttcaattaccagnanccacatgggggcntcacaaccatntgtaataaggaccccgatgccctnttntgangagtctgaagatagta

SEQ ID NO: 805 - DNA, 239 bp, Homo sapiens
  misc_feature (1)...(239): n = A,T,C or G
tgagtacgcatcacttcangggacatgaccntcctgngggtctgccgnagatggatatanacacaaaccnantacttgcctnanacaggannaaantgcnttggagagaaacctctgnatatccanaactcagcanagangaggagactgatgancgagcggncatcttagggactcggntgatgtctgggtagggttgggcanagactgtgaggagcacacctctgaaccacatatga

SEQ ID NO: 806 - DNA, 339 bp, Homo sapiens
  misc_feature (1)...(339): n = A,T,C or G
ttatgggacggtgaccacatgaangtctgcnttcccgaaagcttccaggtgaagccagngccatccatcagcatatactgncttgggaaacaagactgtaaatgagtgtgcaagggaatcaataggctggcccaatgtccttcaaagagtcaccaacacatgtaacttctacagagcagggctttcggtgcagacgtgaagcaggtggcccgtgatcaacttcttctctacgacagtctntgancccaanggattatttgtgaagagcatcgcccttaatgacggatcaaaccacggagaanacaagcancggtacagactaaggctgtctgaaggcag

SEQ ID NO: 807 - DNA, 103 bp, Homo sapiens
  misc_feature (1)...(103): n = A,T,C or G
ggaccacagtagcctttctggcagactgcctcttntcnttgctgcctggagnaaacatngtttcctgcnggcagaatcagngacatgccagcactgtaaggct

SEQ ID NO: 808 - DNA, 111 bp, Homo sapiens
  misc_feature (1)...(111): n = A,T,C or G
gcctatgaatgggacggttgtcagctgcantgacctagaancagcaactgaanggcagngactttgntactgtgcagcaaggccantaatgnatgtagcctctgaccatgc

SEQ ID NO: 809 - DNA, 205 bp, Homo sapiens
attctcactacaggtgtgagcagaagaccatcttggatagtctccagaggacactgacgccaaagctctgctggagagaccggatggctggagtccctgctgctgactttcagaatgggatccatattttaaggaaagctgacagagagataaaagaaggctgtgttcccaaaatacactgaactcaccatgccaaaaaaaaaaa

SEQ ID NO: 810 - DNA, 140 bp, Homo sapiens
  misc_feature (1)...(140): n = A,T,C or G
ggcaaaaagtttcgggggggaaaacccaggnancccacccccagccngnaaccggcgngttcagggggggagcaaaacncgcnnaancaancgggcacggcccacgggcaggaaccngcgggcgccacacacgcgcaccg

SEQ ID NO: 811 - DNA, 141 bp, Homo sapiens
  misc_feature (1)...(141): n = A,T,C or G
agatttttggggccaaancgangccggaacgggnngcngaaagaaagcnngatgagcangncagaaaanaccacgccaccacagncgccggaagaaggcacnggcgcgggacggccngcagggaaggacgacaagggggaa

SEQ ID NO: 812 - DNA, 108 bp, Homo sapiens
  misc_feature (1)...(108): n = A,T,C or G
gaaatgtgagagatcgaatgntctgggctcaagctgtgaggagagaaaagctagccgtccccagttccttcctncctgccagcccccacccttcctccctacccacct

SEQ ID NO: 813 - DNA, 151 bp, Homo sapiens
  misc_feature (1)...(151): n = A,T,C or G
gaacttctcacccgcnccaagcattcacatgaantagcaccaagnctgtaacctaanggaaacccacccatnctcatgttgtcattttcttccacactgagattggcagctgggctgccctggngtcaggctgcatgatatttacaggcca

SEQ ID NO: 814 - DNA, 439 bp, Homo sapiens
ctgaggagaagcaatgagtttagacacctatcacaatgctgaccttcctacccaagcttgaatctgatggccagcccaagatgaacacggaaccttccacttctcagaataaggatctatgctaagaccgccctctcagtcctctccgcagaggagggcaccacaggaaggcttcgttagaccctgtccttacagcaccttttatgaatcagcgagaagctgaggtttttccttgggatgggagtgtgctgcagccaagctaaagacatagacttcaccctctatctacattcagactagtaactatattggttgctgggaaaaccttacatggaggccaaataggcctgctttatggtatttacaggctcagatttgtatgtctggaggttgagcctgtttgtgcaggctcctataaatagagcctgagaaggtgaaa

SEQ ID NO: 815 - DNA, 119 bp, Homo sapiens
  misc_feature (1)...(119): n = A,T,C or G
tgtcctccggagagaggncnatgatgctgtcaatgcctatgngtgcaataggacctcccgcannatgaggagatcatgcctaggncctgtttactcttgtcntaactgatctctgccca

SEQ ID NO: 816 - DNA, 105 bp, Homo sapiens
  misc_feature (1)...(105): n = A,T,C or G
ggcggacagaatttacangaacagcaaacacagtccangagcagagtgaccggggagaannggtagagggcgngcagaacgagcccttngaggaccctcaccatg

SEQ ID NO: 817 - DNA, 130 bp, Homo sapiens
  misc_feature (1)...(130): n = A,T,C or G
tgcagcttattggatgcacatgccatacagtntttttnggacnanctngacacagncagggccatntgggattaggaccctncnaagatccnaagacaccantaaaaaacctggcctatgggcaaacgca

SEQ ID NO: 818 - DNA, 545 bp, Homo sapiens
gactgaggggggctctgcaacctgtgcgcggcaaggccaacaaggagcacgtcctgcaggcggggggcctcccgctcatcatcggctgcctgtccagtcctgacgaggagacggtgctgtctgctgtcaccactctcatgtacctgagctcgccaggctcccgctcccatcccgagctgacctccctgcccgtggtccagtgcatgctgcgcttctccatctctgccagcacacggctccggaacctggcccagatattcctagaggacttctgctcgccgagccaggtggctgaggcccacagccagcaggcccattctgccctggggatcccactgccaaagactgaggccccacagcagccctgacccaaggacacttaaagatcctgccacaggtataggaagcagaaggctaatagcatcctgagcccatcctgcgcaaagtggtgcttgttcagctgcatgcaagctgcagtcttggcatgacaggcgtttgcatccagggaaaacaggaggagggacgaagccagacttgagatgctt

SEQ ID NO: 819 - DNA, 268 bp, Homo sapiens
  misc_feature (1)...(268): n = A,T,C or G
gactgagggaaagatgtctccagnanncattcactgagaggagatgttaccatcccaggggctcctatcctggattgaatcaagacaggaggagaaagtgagcaacccagcattctgtccctgcttcctgatctgccaggtgtcagcaagcaacctcacacactgctgctgccacagcgtgagagcctctccagcatgctacgccaggccagcccatacccttaaacctccagtcaaaagaaacccttcctcccttgaaaaaaaaaaa

SEQ ID NO: 820 - DNA, 190 bp, Homo sapiens
  misc_feature (1)...(190): n = A,T,C or G
agtatagcaacgtagagcnangagacactacangaaggctcccggannccnaactgggnctccnatatatatgccccacanaaggccctgtggaatnacaagannaactaaaggggccanactctggaaggatncgatgnntganaataaagacactaacgaagctaacgacactaacggggaatgagga

SEQ ID NO: 821 - DNA, 360 bp, Homo sapiens
actgaggcctgagcacaggaagtccctctcagtctgagaactcccctgctacttgctcttatcgccaggctccacagtgaaagatgttctatgagaacacggagaggagactgtggcaaacctgaatcagcgtttgtatccaggccgtcaaggaccacatagctatggtgccctctgaatgggcacccagaagcaagtctatgtccaggtttatggacccccatcacactgatactatccaggaaaccatcagagacatccctaagtgcatggtggtgggaattccaggggaagtggagcagcagaaaatgggttaactatagagggactaaaatacacaaggtttccaaaataaaaaaa

SEQ ID NO: 822 - DNA, 183 bp, Homo sapiens
  misc_feature (1)...(183): n = A,T,C or G
ggggcccccaatttccgggggacaaacggcccggcgggacgggncanggggccgccagatntggggngngaggcaaaaccncccancggacaacgganccaagagggaccgngcagacagggagacagggccncaacacnangcccgagagncgcggacgncgagaagcaagccacgggcaga

SEQ ID NO: 823 - DNA, 512 bp, Homo sapiens
tgagcctttctcagaaaagtctacagtatcctctctctgcaagtcctcctgactacagtgacctctgccctgttcctgtatttccaagctctgcggacatttgtccatgaaagccctgccttaattgtggtgtttgctctgggatctctgggcttgatctttgcactgactctgcacagacacacgcatcctctgaacctctatctactctttgcatttacacctgtcagaatccctggccgtggcagcatgttgttaccttctatgatgtatatctggttctgcaagcgtttataatgactactgcagtctttcttggcttgactgcctatactctacaatcaaagagagatttcaccaaattcggagcagggttgtttgctggtttgtggattttgtgcttggcaggattcttgaagctgtttttttacagtgagacgatggagctggtcttggcctctctaggcgccctcctcttctgtgggttcatcatctatgatacacactcgcta

SEQ ID NO: 824 - DNA, 279 bp, Homo sapiens
  misc_feature (1)...(279): n = A,T,C or G
gggtccccctaccgttacncctttcggtnaaanctgtcgctgcacacccggntnatnncgcgtgcagaacgagggcnctggcatgagttcatggtggatgctgaacccngagggctggaaagacaggcnagaccccngcggcgcncgggccagtgtccatggacnatggggccaagttcctgcgcatcaagggcngggcgagcanccaagaagcagatgcacctgncggaacnggtagccccnacgacagcccnttncgggcgcaccagttccagggcc

SEQ ID NO: 825 - DNA, 168 bp, Homo sapiens
  misc_feature (1)...(168): n = A,T,C or G
cactcttgaaccgctgctcaagaagatcatgtncatattnagcatncncaggaagtcataagaccacntctaagggaaatgacncagngcctgtgttcataggaaanangnatgnganttancatggtatttcccatggtcatgtatgaaagccataagatagctata

SEQ ID NO: 826 - DNA, 101 bp, Homo sapiens
  misc_feature (1)...(101): n = A,T,C or G
tgggcaggaagccataactactncttgcnganctctcanaggcgaacccncatttggagaaggctgtcatacatgtggatcaccagcgcactgttctcagc

SEQ ID NO: 827 - DNA, 103 bp, Homo sapiens
  misc_feature (1)...(103): n = A,T,C or G
acggggacgtcggaagganatntttatagggggagcgcaaaanccgcaggcggctgaagctcccctagcctgctgcaattggttaccaagtggtcatgagcaa

SEQ ID NO: 828 - DNA, 275 bp, Homo sapiens
tgaggaacatgactccaccctggtacaccgaggtgaggctggaggtctgacagacatccccgatgctcacaatcacaccaccagtcaagggagccggctctgtacccacccacacccagttcaaaaggtgaacagccccagccagggcctcctgacaagcctcaagctggccccactgatcctcctgcccctgagaaacatttatcgcttgaactttcagcctactaattccaaccaaggtccatatcgctcagcttcaggcaataaaaagaaaa

SEQ ID NO: 829 - DNA, 113 bp, Homo sapiens
gtccagtgtggtggaggcagcggcagtaggcagcaggtggcatgggccaagtggctgcctttatctcctttcttctgaaataaaaggaaaaagtgtttctggaaaaaaaaaaa

SEQ ID NO: 830 - DNA, 155 bp, Homo sapiens
  misc_feature (1)...(155): n = A,T,C or G
cccactacccggccaggacaggncgngngcttnttattanctataccgncagnnagcattatgaatgactgatgangcanccggaattaaatgattctntctaccatcggatcagcaagcagaaaatnggaataaaaccccatggtgaccagcaa

SEQ ID NO: 831 - DNA, 109 bp, Homo sapiens
  misc_feature (1)...(109): n = A,T,C or G
aacattaagaccgaccagctgcttttcgctcctgatggcacaccctctcttctacaaggctgaatcatcaagccatganccaaataaacccttctttcctgaaaaaaaa

SEQ ID NO: 832 - DNA, 157 bp, Homo sapiens
  misc_feature (1)...(157): n = A,T,C or G
gaatacctaattttttttaagaagatgtananggaggttancccttatgtnaagaacattactcntgggcagatgntggngcgccgcntttaatcccagcacatggggaggnagaggnaggctggntttttgagttccaggccagtcaggttctaca

SEQ ID NO: 833 - DNA, 516 bp, Homo sapiens
  misc_feature (1)...(516): n = A,T,C or G
gaccccacttgcacttttgactgacagacaaaggaaagactcgaaggaggatcgcttctctaagccgtgcagccaaaaaccagtgctggggtgtgtcatccaaaagtttatacctgcctgtcaggcttccccacctttgtctggaacagcacttttatttaggagagatgatcgtagtgtgcctgtccatcatgtggtcctattgaacacaggaaccaggagatccaggcagagtgtgagaacactctctggacacagcaactggccaagaagaactggtcaggttccttttaaagactcgacacagatgagaggaaaagaagtgccatctttgagtcagcatgggacagtctggggctgctctgctatgggcagaagttgtgtgccccaaaatggagctaacatagagagaggggcacagaatgtagagagcaanacaaagactcaagtccggatgctgtaggatctacatttggngaaagctcatctctnagtcgggttccccttgatttatac

SEQ ID NO: 834 - DNA, 221 bp, Homo sapiens
  misc_feature (1)...(221): n = A,T,C or G
acggaagaagggcggagaggcgcccagggacgncancagggcacaggaccagatttncgngcgcggggncacncagcnccgaccgcngacccaagnccccagcgncgggcnggncgccgaaancaaaagcnccgccccccnagaaagggcagccggcgncncaacccgggcgccccacccananggngggnagaggccacgcaccgagcagagcgaagggg

SEQ ID NO: 835 - DNA, 161 bp, Homo sapiens
  misc_feature (1)...(161): n = A,T,C or G
cgcgacgagcggagcatcatgtnagaaacaggcggacataatgctgtcaanattccttagntgggtgttnacagagncattctnngncnnngagtgcacgtctgccttgnggnaaactncagggntcccctctgcgtccagaagatgggcatacagcgaag

SEQ ID NO: 836 - DNA, 155 bp, Homo sapiens
gactgagggatctgagattgctctcacacaccaacccagcagcgtccgtggagaaaactctcacgagcaactcctttaaaataccgtcatttcaaaccgttgtggtctttaagcaacaacaggggggggggacccaaacaacaaaaaccaaaaaa

SEQ ID NO: 837 - DNA, 191 bp, Homo sapiens
  misc_feature (1)...(191): n = A,T,C or G
cagtgcccctgatgcattaactgccacctgcccctgggaacagggggaggcaacttctatggctgctgngagccaccagaggngccaaggcctgatcttgcccggngntnccatgacctgaagcctgnacaatcctactgcaggcttacagccttctccacatcagggccccttcggagatcccctgagtg

SEQ ID NO: 838 - DNA, 342 bp, Homo sapiens
  misc_feature (1)...(342): n = A,T,C or G
ggcatgcgtgggttgntgtctgaggtcggccagcacatccgccaccaacgggccatccttagccggactctgtgctaaggtagacctttacctgggcctgctcccgctgcacccagtgcctcaatgagagtacctacattctgcgtgaggtagagcacacctgccccagggagatcttgctggcccgcttcaagcaagcagcagagagcaagatctggcgtaaggtgggccgcaggcctagcttcccaacgcctatgcgctatcaagtctgtcactactataggccagggttgggctgtaggcgtcactggaatagatgcacctttgcccgaaaaaaaaaaa

SEQ ID NO: 839 - DNA, 263 bp, Homo sapiens
  misc_feature (1)...(263): n = A,T,C or G
cccagagagactgtttcatttccagtagggacagaaacaaagagcagctttaagctcatctctgtgcatgcaaccctgaccaatcttgaaccaggtgatgtcctaactatggatatcatatttattgnataagccnncncatgtacaanngaataatatacgtntnttngagacttnntggaacatngcctganggnattntattgcaaaatgctttccatatacagagaataaanactntctttgagactcaaaaaaaaaaa

SEQ ID NO: 840 - DNA, 294 bp, Homo sapiens
  misc_feature (1)...(294): n = A,T,C or G
ttgatctgagacctannaagagagaagatgtccactnttgcctgcccctntnaacagttattgttgcctggggnnngggnaggccgtcatgatgggacattctggggaaaagaacctctccctggaactagnttttcatgnatacaggagagcaaanantatgngcagnaaggagcctatgnggaggggnatgttccctgngtgtaggtgcntgncnatgtgtctgaggggaccggaggacantaggncgcttntntgccttaacnccntggctggtgagcttagctctagatg

SEQ ID NO: 841 - DNA, 127 bp, Homo sapiens
  misc_feature (1)...(127): n = A,T,C or G
gccctgaaaattaactaangctgcagaactcaaatgcaatcatagtgctcagacancattcaaaagtgataaaagatggntatancatnagcaaaacanaacttgaggattacatcattcacagatt

SEQ ID NO: 842 - DNA, 265 bp, Homo sapiens
  misc_feature (1)...(265): n = A,T,C or G
gatagtgacgtggtgtccttgaaggacgtgtncncaagnttccttgtaattacnaacntgatgcccaccacngagcgtctctngnnaaaagcctggaggcgtgancttaggactgccctcctncnctgccccggcaccctgcgcctctgaggatgttnggtatcaagaggaganattgntgnaacacanggagcatngcatgntnactgagacgggcgttcgtagctntgnctattggnacacagaggtcctgtcattatgaaag

SEQ ID NO: 843 - DNA, 119 bp, Homo sapiens
  misc_feature (1)...(119): n = A,T,C or G
gctggagcttggagcctnctctgtaccatacacagcnnccnggtcccggcccncacccacagncnggngcagcgcttacagntntgcctgtggatttgcanccagtgcctggtgcctca

SEQ ID NO: 844 - DNA, 162 bp, Homo sapiens
  misc_feature (1)...(162): n = A,T,C or G
gactgaggtcccggagnagaaggaggnncatgagagaggaancagcaggtnttannagagaggggatgaagatgncgancagacctacnaccntgctctcncagntngctggnatgccttctccactgatgtggactctactggaaccctaagcacaaaata

SEQ ID NO: 845 - DNA, 133 bp, Homo sapiens
  misc_feature (1)...(133): n = A,T,C or G
cccccaaaccccttctntcccgggttctttttgggggccttggcttttttatngggggngggggaaccnncnnttcggcccagggntnccccctttccaggcctttacccgggcnantttttaaaaaaaaaaa

SEQ ID NO: 846 - DNA, 309 bp, Homo sapiens
  misc_feature (1)...(309): n = A,T,C or G
gcagcagtcattggtgctatggatcactttccaaaggagtcatgcccagcccaggctggaaggactgcaggaggcgagtctcacttttctcaacaaggatcatctttgatgcagggagctgacatggngagatgatccctcttagccacctctgcaaggtgtcacattcagtgacagagctgggatccagaggcttcagctcttcagcaccagcctcaagctttcaaggataccatgtagcttgcgagatttaaaaactgatgtctggagatcaaaataaaaggttgttcttttgtggaaaaaaaaaaa

SEQ ID NO: 847 - DNA, 102 bp, Homo sapiens
  misc_feature (1)...(102): n = A,T,C or G
gactgaggtattctatgctcagctanatgtacatgaactgngaatcancactannagcaccggntggttaaggtcatggagattctcattaaaggatccaga

SEQ ID NO: 848 - DNA, 270 bp, Homo sapiens
  misc_feature (1)...(270): n = A,T,C or G
gccacctaagttgaagcctgggtntttgaacttaggaccttcagcagcactcttacctgctgagccatctctacagccccactgntagattgttaatgcaagggtttaagagtggcatggnccngagtgntggattggtaggtagggaatccctggaactgaangggtaatcagaaactgggtccaacatggacttcaggcttcttgtagcagaacattctctttaatccctttangtggcagaaaanatttanagtgtacagcttttcc

SEQ ID NO: 849 - DNA, 111 bp, Homo sapiens
  misc_feature (1)...(111): n = A,T,C or G
tgtgggcccatgctgtgntncatcaacatngacaaggaaggagngggcttangtggacngaaggaggaacnnatggggcagtcagaagcnnatgtggaggatatgtaatat

SEQ ID NO: 850 - DNA, 141 bp, Homo sapiens
  misc_feature (1)...(141): n = A,T,C or G
cttttgaagcctgtctagctattgaaaagataggattactaaaaatggatcccagganngaacaggagaaaccaanngantaagaaatagtntnttanttattttatctaagcctatncaaggaatgcgcactgatttaat

SEQ ID NO: 851 - DNA, 128 bp, Homo sapiens
  misc_feature (1)...(128): n = A,T,C or G
gaaccaaccaaggcgaggntggtaangggntaaacgacnacatggacacncttggtatncgggctacntaccncnttncttatttaacactcgtnggttacaagnaagcctttaaaggagtccttctc

SEQ ID NO: 852 - DNA, 121 bp, Homo sapiens
  misc_feature (1)...(121): n = A,T,C or G
cgccggaaggatgtgtggatagacggcttaagaacaaaaaaggaganggaggaagaggaanngaagaangangaggaggaagaagagganggaaaaggaggaagaggaggaagaggaaaat

SEQ ID NO: 853 - DNA, 105 bp, Homo sapiens
  misc_feature (1)...(105): n = A,T,C or G
atttgggtctcagggagggnagagcnttccaacattggagaagaccancnttactcnctgggctgattcaaaggccaatatgcatnntngaacacctttgaaaat

SEQ ID NO: 854 - DNA, 109 bp, Homo sapiens
  misc_feature (1)...(109): n = A,T,C or G
ccccctgatccccaggcnctcccngaanaaagcggacgagaagctngtcaggataaagggntaccatcnccatanccccagnggaaaaagcactacgtgctcgacactg

SEQ ID NO: 855 - DNA, 345 bp, Homo sapiens
  misc_feature (1)...(345): n = A,T,C or G
gcgtgtacaacttacacatgatacggtctgttcatcttctcccagacactctggcactcagcaatgattttattttaaaaaacgtcttcaaacagaagctgcttgactggcctgggctgccatagtatgttttctataatccgaggatttgccatcttggagacttnttggagcaccgcatcttgtacatgcgtcttcctcacagatgggccagcttctgtacagaaagcagacaccctcagcccacggccaccatgttttatagtaacttttgattttacagtgttactcagaacagtttgaataaaggaaatagaaaagaaattaaacaacacagaactaaaa

SEQ ID NO: 856 - DNA, 115 bp, Homo sapiens
  misc_feature (1)...(115): n = A,T,C or G
ggcgcccggcggccccaccaaccccnaaaaaccccncnnacccgccnttntggggggggaacnccggnngccccangnttttggggggggcaaaacccgaaacccggagaagaag

SEQ ID NO: 857 - DNA, 187 bp, Homo sapiens
  misc_feature (1)...(187): n = A,T,C or G
aaggggacttcatgaagcctgccntcgacgttgnggataatgntgctgncagctggggtcantgtgaccgtgtacantggtcagtgtggatctcantgcgnacaccatatgtcannagtnctggnttnagaanctnatgtgggcatantctgctcacattcaatcagctntaatggaaggctctgta

SEQ ID NO: 858 - DNA, 245 bp, Homo sapiens
  misc_feature (1)...(245): n = A,T,C or G
gaggactacacttgcagttctttaaataaagatgaagaaataatctgcagtattgttagacctacacggacctctcaaagaagaaagcagacagctgagttctacaggtgtttgcngctcatatactacacaagctgagccccgtaaagagaagatgagcaggaggaaatctcgagaaaaaaagcacacaagctgctggcacttcctaaaaagaaacaggttttaaaaagttacagaaaaaaaaa

SEQ ID NO: 859 - DNA, 147 bp, Homo sapiens
  misc_feature (1)...(147): n = A,T,C or G
cgctgggcctggggacactgctcccctgnaanttnttcatcgaccgccaccaangatttaacaaaccgnctggacgngncccagaanggggcctcgggccaccggtcaaacatgcgaaagcaccaaggccctaggctgaccccacag

SEQ ID NO: 860 - DNA, 182 bp, Homo sapiens
  misc_feature (1)...(182): n = A,T,C or G
aatgctgtgcgagggattntncccgcgaaaacaacancaccgcatctatccactccagaaagggaacgcangccancaccaaagcccagcgccatgcacggaagcctaatgangtaggaggaaantgctntataccaggagaanaggagaggcccntcgnatctggagtcaccaaccctgag

SEQ ID NO: 861 - DNA, 363 bp, Homo sapiens
  misc_feature (1)...(363): n = A,T,C or G
cttgctcacccctgggngctgncaagaactgngaagnccatggncatccaaatctaccaaaaaaagaagtcnccctccatgtctaaaaaaactgtgngcttntcctcggaaacttgagantccaccagcgttcnanatacagtannttgnngttctttagtactttnatggaaatcttctgatggaaccgccctcgctggtctnctgntacaccantaggtnaaggccggtggggtgntntttttntaatnggatnntgagaagntncanaagttcgttttccanctgtggacatttnagacacatctgcnccataactnacacatttcaataaagcattttcaagactgttaaaaaaaaaaa

SEQ ID NO: 862 - DNA, 230 bp, Homo sapiens
  misc_feature (1)...(230): n = A,T,C or G
cctacacacagactctactagtgcattcananacttggatttattnnttantatattggaangatnnggntncttatcacctgtaatctaaaancttngggaggctgaagcaaatntctcagaattanacaaaagtttaaaccagcctgagctacacaggatgtctagaccagcgggagctatcctttgagaccctgcctcaaaaggaaatttcctttttgtcacaatcc

SEQ ID NO: 863 - DNA, 103 bp, Homo sapiens
accagcatcccagctttccttgacgaattttggatctacaggacaacctctgattgctttacctcagacacttcagccccagttacagcacactcttatcaaa

SEQ ID NO: 864 - DNA, 208 bp, Homo sapiens
tctagaagatgcactattatagatactcgaacgccgaggtcagcctgcctccatgtctgctccttctgcttcacgcacatgttaggaaatgaccttccctgtaggatgctgggaacgctgcggtgtgagtttcccggtatcctcctgtgggctttgctcttacagtgtttatttaataaataaacacacagatttcaaaacaaaaaaa

SEQ ID NO: 865 - DNA, 165 bp, Homo sapiens
  misc_feature (1)...(165): n = A,T,C or G
ttgcaactggctatgtgctattctntaagagcttgtgnntgatgaagaaggggcacaggcnagagnnaacagctnnanctnggaaggccttaactgcanccttctcacctgtacacntgactgnngggcttgcgtctncgcgcatggatattttttctaacaata

SEQ ID NO: 866 - DNA, 220 bp, Homo sapiens
ccaccaggcactgttgttggcagttcttgtgactcctcttattgatcttcgttctgatttttcaaaatttcaagaaatgatagaaacaactttagatatggatcaggtatgcaattcacatttaattcccacagcaaagtatttttggaagggaaaaagtaaccagaaacaacagaaaaatcatattaaaaaatgtctaatttgtcttgaaaaaaaaaaa

SEQ ID NO: 867 - DNA, 109 bp, Homo sapiens
  misc_feature (1)...(109): n = A,T,C or G
caatggcttttaaggacagcagcancaagaggctatattcccagaggagtntccanncggnctgnnagcaaatatcctaagtcgacatgtnctgccaattttgttctgg

SEQ ID NO: 868 - DNA, 143 bp, Homo sapiens
  misc_feature (1)...(143): n = A,T,C or G
aaagacgatggtttcccagggccaaggaanatgacccgcttaaagcnggcancatcganggtacagaagaagacccactngccagcatgttgggggatgagcaagagaccttgcttattagaaacaaattaaaaaacaaaaca

SEQ ID NO: 869 - DNA, 105 bp, Homo sapiens
  misc_feature (1)...(105): n = A,T,C or G
actggccagccacagnaaggnacagtggnatgaagnacatnttggagactctagtcccacaaagcccncaaagnccagtgccagctaaagccatggaagaggcct

SEQ ID NO: 870 - DNA, 164 bp, Homo sapiens
  misc_feature (1)...(164): n = A,T,C or G
atcgttgttgtgacggatttttcccgtgaaaacaacagnattgnatctattcactccanaangggaacgcatgccagaccaaagttcagccgcntgcaccggaagnctaatttgttggaggaaacgtgcatctataccaggcagnagaggagaggtctttggat

SEQ ID NO: 871 - DNA, 381 bp, Homo sapiens
gactgaggtggggtctttcactctgctctccttgggatctgcacaactgtggccctgaagccgacctggccaagcaagactgtggtctccatccctgaccagcccactccctcccaaagaataacttcttcagcgtccccccacagagagaccaggcctcatccagagtcacagcagcagtcctcctgaccttgaaccctggccctcagccactgagccaggcccaactgtaggaggaactctcaagcagacatgttgggccttgtccaccctgactgccgctggagaggacggcttcccaggctttctcagggctattcctggtgtctgcctctcagattccaaagactggaataaaatttaacctgggaaaaaaaaaaa

SEQ ID NO: 872 - DNA, 201 bp, Homo sapiens
  misc_feature (1)...(201): n = A,T,C or G
acatggtctacatgtnccagtatgacttccactcacggnaaatttcaacaggcacagtcaaggnccgngaatgggaagnttgncattaacagggaagcccatcaccatctttaggagcgngaccccactaacatnaaatggggggaggcnggtgctgannatgtttgtggagtctactgnngtcnaaaccaccatggagaa

SEQ ID NO: 873 - DNA, 117 bp, Homo sapiens
  misc_feature (1)...(117): n = A,T,C or G
aacaagtaagaatagcnactccattgatcaagnatnaatttgacatncaggantnnanccagccttggcaacatactgaaaacatgttgaaggataattaataaactgtccatagta

SEQ ID NO: 874 - DNA, 206 bp, Homo sapiens
  misc_feature (1)...(206): n = A,T,C or G
gtccttattgtaagaagccgtttaagtgttnaaaatcccacttgccgcactgtanaatgagaggaccgtccatatctgnngatcaaaatgtttctcagtccaagcccagctgcnccttgntcaaaaagagaagagncctaccagagacttgaccagagctaaagagaaggagctagaggtagaccgtnnnaaaagagctgggggag

SEQ ID NO: 875 - DNA, 319 bp, Homo sapiens
  misc_feature (1)...(319): n = A,T,C or G
actgagcctgtgcagtgttggggaccatctgtctcacttctctgcacacatgaggccagtataactacanatggcngaagacagctgtatttacaccttcctgttgaatacctcgcagcatctcttggaggaaggacagcctctgatggcaacagctgctgcttagcctctgaggctgagcgttggacnaaggcaaaagcagngcaaggaattattnggcttcagagaacactcatgtaaacagagtccattttctgttgntataatacaggcggactggaaagcccctcaccacatcaccgggttttaatagagctca

SEQ ID NO: 876 - DNA, 371 bp, Homo sapiens
  misc_feature (1)...(371): n = A,T,C or G
acgtctattatgttgatcacaacaccaagaccaccanctgngagcggnctatnggctccagggtaagacttgagactctagaatggtgtaatgggtaccaggactctcccatangcatntccaccactccagaangctgtnttgatctnaccctgttttnttttgctggctctcccttcctcctantctccccaactccagcctgnnnggngnttngtccacatgctttngcatgtggcactaaatcatgggcagggactctntnactgtgtgatactcngngctgncagaacactggtcctggagcntnnngggcttnangaagccttntgggccccgagcccnagntagntcttctaacttctgtggat

SEQ ID NO: 877 - DNA, 402 bp, Homo sapiens
  misc_feature (1)...(402): n = A,T,C or G
gaggtacctggatgtcagcatggcactgtggccaacgcctgcatgccaatagcttgcttctagccccacgccatgagatcttggcgcactcctagatacagccatggctgaatcactatgccacctagaatatgaatcgcctgaagtcaaagcagagaaggagctatccctccacagatccaggacagcctatgagagcagagcagcagcctcggctccctcctggagacccttgccntgnacagtccctttaccaagcagctgtggctcctgatcttagcaagatgacctcaaccctgatgttgccccaacctgattgtgtgttcataattttttttgttagtttcatccagatgttcaggatccaacaaatgttattttctaaacccgcaaaaaaaaaaa

SEQ ID NO: 878 - DNA, 216 bp, Homo sapiens
  misc_feature (1)...(216): n = A,T,C or G
ctggccatggtaccagtggtagccacagtagagaggnggagtcacagntgtcanctcatgangtcanngncnaggaagtgcaacgctgtntctcctgccagctgtgaccatntgcgtcacannccctttttaancataacatggnggacaacgnaggagtggacctcttcantatgtagcnggntnngaatgncagggaataaatttcttggccat

SEQ ID NO: 879 - DNA, 144 bp, Homo sapiens
  misc_feature (1)...(144): n = A,T,C or G
gttagagggacttgcngacgctaaagncctccgtatgaaaggttgagagatcatgangatgcannagagnnttctnattngagcagaccantgncctcagcaagcgagnggaagnaatcgaagcagnatcaggaggaaatccaa

SEQ ID NO: 880 - DNA, 122 bp, Homo sapiens
  misc_feature (1)...(122): n = A,T,C or G
gagcaaccggccggagagagagaagaggccgaggangggngatttgccnaaaccncacnagnccngngacagaanaagngcgggcaccaccancggccgngaagaagaccacaccggggccc

SEQ ID NO: 881 - DNA, 109 bp, Homo sapiens
  misc_feature (1)...(109): n = A,T,C or G
acctgcgttattaaaagacctcagtttatttaaanagtgtgactctgaangcatttntgaatgggcgttngatgaaaatctgtccgtcantgttgcttgaaaagagata

SEQ ID NO: 882 - DNA, 284 bp, Homo sapiens
  misc_feature (1)...(284): n = A,T,C or G
tgagatatactttttcctaacctccaagnataagaagctccccccaaaggaaagaaaggcagagaaaataagcaatgagttcattgcctgaaatggctgtggtgtctgagaagatgtcggccgctccagatgaagttgttatgttcattttagctccacgtatctgtaacaatatttgaagtggccatttcaagtcctcttagtgatgatctggtattggaactctgttgctcgttcagcattcgagtatgctaaagacagatatttaaagtcaaaaaaaaaaa

SEQ ID NO: 883 - DNA, 165 bp, Homo sapiens
  misc_feature (1)...(165): n = A,T,C or G
cgctatggaaagcacgattaagngggtntgaatgaagccgttgaanatcttccatattntnaaggatgngannagtccnccaatggtccagcactnnttgctcncanntcatacataacgagatctgacacccctcttctggagngtctgaagacagcttacagt

SEQ ID NO: 884 - DNA, 131 bp, Homo sapiens
  misc_feature (1)...(131): n = A,T,C or G
agctctttggacactgnaaanctcaagtgcggacaataangacgcttcattgntgnaggtggntaatccatcanaggctccnacaacatgngtgggcgactatatntacnagtggcctacacgggggtgcc

SEQ ID NO: 885 - DNA, 117 bp, Homo sapiens
actgagattgatcagggacccgaacagaactcgtgcttcaccgaagaaaaatatcttaaacatcgaaaaatttaaatattatgaaaaaaaacattgcaaaatataaaataaataaaa

SEQ ID NO: 886 - DNA, 310 bp, Homo sapiens
  misc_feature (1)...(310): n = A,T,C or G
tgcagtctacccaggcggnaactgangcgcaggcgcacggggctcgccgagcgcccctctggtccggtcgaggacttcccggcagacaccgcgccgcggctgcgcagaagcggggaggcttttaattccattgtggagaggacctttacccctgtatctcttaagctgtaggatctctctctctcttctcttttgttttatacaggttttgaatttctttaacttttattgtgtgtactgaatactacatatgtattattctgattgtttgctctagtttactaccaataaaagtcctgttaatcacaaa

SEQ ID NO: 887 - DNA, 248 bp, Homo sapiens
  misc_feature (1)...(248): n = A,T,C or G
tgaacaccgatcaaganccctggccattctaagtgtgcttgctggccattgaacctagggtcttgcacctgctcagcacacgcttaaccgtaggctacaatcccagccttggagaatacccaacccagaacatacacccgtcatttatcggacccgnaaaggaaatnaagacattccagaggaannatnaaattgatntgtggnctttcaccacaatacacatggaaatagaaaccagaaaaaaaaaa

SEQ ID NO: 888 - DNA, 165 bp, Homo sapiens
  misc_feature (1)...(165): n = A,T,C or G
actgaggctacttgaagagcaagggtagccgagcaagaagagctgaaggctctggagactgaacccgtgccaggtcccaggggaccnancngagcctgttgctggagccagtcaggctggagatggcgggcaaaggactatgggagaaagcgattttgaaagttg

SEQ ID NO: 889 - DNA, 156 bp, Homo sapiens
  misc_feature (1)...(156): n = A,T,C or G
gctacatagtgagacatttcaaccccnacctnctgccagaagaggnagagggaacttaatatggttaaaactcattatantatggntgngtggntgatgngnggaagcctcttacntctgtacaacaantatnctctaatagaaattaaaaagatt

SEQ ID NO: 890 - DNA, 429 bp, Homo sapiens
  misc_feature (1)...(429): n = A,T,C or G
ccacaatgcacatgccacattcaggtaggaacattgttggacccggaggttgtntagcccacancactgacacnaaccatgtggcgtgacattatntnattcattggccagtctatcatgcagaggcagggacancatggcatggtcctttgtggagggctgnagnctttatacnnagacacanaacaagccnattggngggnnnctgtgcanncctgnatggggttnaaaattcatttcancnctttccagattccataggccangtggctctaccaatactggnctcagggccaatcanctnctctttgccctcatgtgnggngcctcttccaagaggttntnaaggacataggttgttccgttcgggncantggtacaagcctnttaccgccttcacttttcagcctgngagtgctggattcccac

SEQ ID NO: 891 - DNA, 372 bp, Homo sapiens
  misc_feature (1)...(372): n = A,T,C or G
gactgagggacaaagaagaacactggtttggcctggacaccttttctactgagaatgagaagtggcctgatatacttatagcttgacaagtgagatggtttgatgatgtcttcaagagctaaggagaagggactgaaagaaatttagttaagattgaaagctggttgtgaagcctgttagcagatcttcaggatggacngtagtgagatgcagcaaacctgttctttgcctgaagaacctgcaacaagactttgtggcctggattgttgacccattgcatggatatggactttctgggaaaccttagattgttggaaacatttatgggaataggaatctttcattaaatacctcaattttcaaaaaaaaaaa

SEQ ID NO: 892 - DNA, 231 bp, Homo sapiens
  misc_feature (1)...(231): n = A,T,C or G
gtaacctatgggatattgaccntatgaancggaagtacattctgannattctcatacctgngnatgtatgtagacatggagagnngacaacacgaacanttttagncgccacccttagnttacnanggccattgattctggngagccagcatagcacagnaagatnctgagaagcctgatggagttttctttgaaaacagggctgcccgngctgttgcccctctgactgca

SEQ ID NO: 893 - DNA, 380 bp, Homo sapiens
  misc_feature (1)...(380): n = A,T,C or G
ggagcagaaggcattcctcgcttgcatgtcttgccttgtncananagncnncatgagaacctagaggcagcgcannatnggnntanntaatgnctatgcgtgnncaaaatattanaccggttgaannccngtggccggancacccgttccntagncacntgcttgganaggcagacataatttancacctggtngntcactcaccanaggcatgccgagccaatgagtaccaagccctggagatagagtactaaattctgggacaaagttgccactcttgggatttgcctgcaagtggaggaggctgatgtaggattgttactcaactcaggactgaacattgcagttgtgattggcatcacaacagaagaaattcgggg

SEQ ID NO: 894 - DNA, 127 bp, Homo sapiens
  misc_feature (1)...(127): n = A,T,C or G
agtgagctatgcacacctgnatgcttccatccnaanagaagcattcantcatgtatagacagccncatggacatgatgggaatgattgggagagatattaaaatgacaaacgtgtctgcaggaaaaa

SEQ ID NO: 895 - DNA, 549 bp, Homo sapiens
  misc_feature (1)...(549): n = A,T,C or G
gactgaggtggggtctttactgatccggcgcggcggnttgaaagtgaagcagactcggttctccgaagagcttggcccgcggctgtttagtgtgatgcccaaggacttgagaacccgtggcatctgctggcttctttccaggaccatcgtccgggagggacttggtccctgttctccatgagcgcatcttccagtcttagcgctccatccgagctctcaggcacggaggcgggaaaccctcgcgccttaaacgcctcccggcctggccgtccctttgaaaaggcttgtagaaacatcacctccacctagactatcccaggtccccagaatccatttgccttcaggaagaatggaaatggctctgtgtagaccataggctgaccagatctcggacagcctacagggaggcgattctgaaattacactcccatagctaacgtgcacctggccttttgatctggaagctgattgaagctctgcatcgtcagaatcagccaggcaaccttgtaatcccaatactgtggaggcagatagaagagaatcactggt

SEQ ID NO: 896 - DNA, 181 bp, Homo sapiens
  misc_feature (1)...(181): n = A,T,C or G
ctctgtcctccataggncacatnaggcnatgaagactatgaanacgtaagtgctatntctccccagnggcctnatactgatagngaatcccattgtnctttnatcttnnatggacatagnnngctgtcattatgcanctatanatggacacncggtttttctttgagagataagtaataaa

SEQ ID NO: 897 - DNA, 273 bp, Homo sapiens
  misc_feature (1)...(273): n = A,T,C or G
gactgagtgtttgaactgttngaagatgagggtgggcnncaantgaagcacaaattgactaactgcaggtctctggnctccataggccacatcaggctatgangactatgaagactaagngctatctctccccagangttnctcctgattngaatcccattccctttcatcttttatggacatagnctgcttgtcattatgcacctatacctggacacacgtttttctttcagagataagtaataaaaggaccagattggctaaaaaaaaaaa

SEQ ID NO: 898 - DNA, 273 bp, Homo sapiens
  misc_feature (1)...(273): n = A,T,C or G
tctatacctgaggtcaagcttnttncacagtggnngatacntgatgnccanagactatcatganggtgataggtctgggacctcaacatggagggcttgcctgcngngacccaccacgtncatgacgtacctgcagaagcaggctcctgctggcttgttngagaacnactgcgatcnttgacnantttcgagcgctgcctggatacgnatcancanagnncccttattnacggngtcctncatacaanattctttngaatgttgcgatatgac

SEQ ID NO: 899 - DNA, 101 bp, Homo sapiens
tatgcatgagatctacggactatatgttcttcaagaactgatcagtggttttcaccttctggaagaacacataggaagcataaatatggtcgccaacaata

SEQ ID NO: 900 - DNA, 163 bp, Homo sapiens
  misc_feature (1)...(163): n = A,T,C or G
gaagagaaaacaaacagncaggaggcccaccccagggcnnccccgacggagaggacccgaggaggccgnaacagccccgaggacccnncagacgcnaccggaaaaagaaaaccgcgaaggcgcggaggcagagcagagngncggccgggggggagagagaccc

SEQ ID NO: 901 - DNA, 426 bp, Homo sapiens
gactgaggtggggtctttcagaggagacatcaagtctgagatcttggatgagtctgaagactactgtgagtttgacagttgcttctctctacctccgagcccttccagcagcctgcggggcgtctgtaccagaggcctgtgggtcttaatgctgctggagctccagccagaccccacctccccacctctggtataggctggtgctgcccctccctccacacaagccacgcagaccgacgtgcggttgagttttgtgatcctgtgtgaacagagggctctgtaggcagccctccatcactggaagaggctgctcttggcaggcccacattcctttggatgggatatgaagctcagtagtagagtatttgtcgagctggaatggggcagagtttgatctccttcagcacacaggtttaaaaaaaaaaa

SEQ ID NO: 902 - DNA, 118 bp, Homo sapiens
  misc_feature (1)...(118): n = A,T,C or G
acttgacgccctatttggnctnacaaaccagctctgcttgacataaatnacttctcgaaagagagttctgcttnnaggangngaggcccatttgatgattntacctgtatttattagg

SEQ ID NO: 903 - DNA, 346 bp, Homo sapiens
tgccttgctcatttctcagtcttcagctgcataggtggcagggctggggagcctcgcaaaccttccagatcacaactgtaaaggagcagctctctccagtcctgcctccagtcctgcctccatcctcctgcactgtggaggaagagtcctctccccagcctcctgtgcctcatccgttgaatgggaataaaggcagctcccttgggctgccgggaggatgaactatgatacattccacaataccatcagtacactgtccggtaagggctcagagatgttgcttttcagagcagttcattcagggcaagcaagtagcctttagcaccaggtttccggtgactacaga

SEQ ID NO: 904 - DNA, 544 bp, Homo sapiens
  misc_feature (1)...(544): n = A,T,C or G
atctgaggaaccctaccttgagttcaaagggtcctcaccccctcctcgattagcatccgtattggccttcgtccttcagctcttcaaggacaccgaaatgggtgcctgtgaccttgagctgctccttcctggcatcctgaaatgtttggtgttggtaaatgaaccccaagttaaaaagctggccacagagaacctgcagtgcatggtacaaacctgccaagtggggtcggaaggaggacctgccacccagctgacttctctgtttagntcatccaggactatggaatgcaatacagntatcaagtatacancntcctagagacagnnncaacgctgaatcancacagttgncatccaatngattnctaccctcactcagtctctgaaggattcagagctcanatggggcctcgnnagaaatattgcacaaagggaagcatatancagacttttatntggcctagnacaggnaggacagggcgagaagcananactgnnanagtgacgaactgagacgatgctggtgccttcctgcctgggaggg

SEQ ID NO: 905 - DNA, 132 bp, Homo sapiens
  misc_feature (1)...(132): n = A,T,C or G
ttctttgtcgcctacacatnttaaatgcaagnctttctattgaaataganttatgnaccagacntaggtgccaaaacattaaaaatggaaaacaatttttgaaataaaattaaaacaagacatattgcaaaa

SEQ ID NO: 906 - DNA, 113 bp, Homo sapiens
  misc_feature (1)...(113): n = A,T,C or G
agccaaagaggccaaaaggnccaactccaacaaaaccatgganccaagctgcnnaaaanggaccnntnccaagggcacttaaagngacctatcatnccgagccagcggagccc

SEQ ID NO: 907 - DNA, 144 bp, Homo sapiens
  misc_feature (1)...(144): n = A,T,C or G
gtcccggggattttggggnaaacctggagcancangtttcgncactgntnctgncaganccagcgactacctgcagcctgctgctgctactacccaggacnccnagccatnttnccttggccctgcttgctgcgacatgaagca

SEQ ID NO: 908 - DNA, 371 bp, Homo sapiens
  misc_feature (1)...(371): n = A,T,C or G
tcctcatggaactcgaggtagcgnattgnctacancgtacagtacnatncgngggatnatgaggnctacatgnancgatctntacngcttttatataanatttnncctcacntcntgnggggaaacatatgtcaaagnatatggaagangactcatatgattgagcttaaaagaatatctggaatatgtgtaattttctactaaaacacctataatataaaattggctncaaagtttgtagnaacttgctagtctttcacatggccagccaatgagagcaatgactttgattactgtgtgctgcagaaagnccctcttttctaacgagattctcagccgcttttctagaagatcccacatatttttatacc

SEQ ID NO: 909 - DNA, 118 bp, Homo sapiens
  misc_feature (1)...(118): n = A,T,C or G
atgggatgtgtggatgaattctanacantctgatngtgtcctggaaaattntttcactatgttcaaangntgagactagccttgctatgaanacagncagttcattgactcattgaac

SEQ ID NO: 910 - DNA, 110 bp, Homo sapiens
  misc_feature (1)...(110): n = A,T,C or G
aaaaggacttattactatnttttgctgaatttaatttatataaaantagcattnggacacttagctttntanttatcaganggaaatatttatgtaagcctgatacttca

SEQ ID NO: 911 - DNA, 140 bp, Homo sapiens
  misc_feature (1)...(140): n = A,T,C or G
gggaccgccccccaagttccgggggaacccagcggcgagngcaccccaccanncagggngtcgaganggagggaacgangnagcaccaggacgaccgagaacnncaaaggaanaccaggcnggccgcggaaccacagaga

SEQ ID NO: 912 - DNA, 322 bp, Homo sapiens
  misc_feature (1)...(322): n = A,T,C or G
ggacaaaaaccacacacccaaaaccaagcagaacaccaaccaagaagggaaagccagncgaggngaaagaagagnccggagaagccagngagcaaagaggcaagagacagagancgaccagagggcnacnntanccccanggaccgggagcancaggcaggagaacgggagggccaccagcgccgcggcncgcaggccnnagaggcagaagaaccagagccggcnggagganaaagagaaggnggccgncagngccngagcgcaacnacaaagaccanngcggacaaaacggccanccganaagaaggcgcggggagaggca

SEQ ID NO: 913 - DNA, 204 bp, Homo sapiens
  misc_feature (1)...(204): n = A,T,C or G
aacccagggcttggttacggaactgtngggcagcatgaatctgagccacatgaccaccaccctggatgtcctcaccagcaaaccactccctgtccagaagttgaccaactccagtaatgtatttcagtgtgtggntccatcaccaccaggggcgcctgntcatctcgataaagctgtttgcaggntgcactgtaaaaaaaaaaa

SEQ ID NO: 914 - DNA, 245 bp, Homo sapiens
gaactgaggccggctgcgtgctccctaggtgaagctttcagccagccttttgtcaccgacaacgtgcgcattctgggacacacctgcttccaaacacgctgtgaccgtgccacgccggcccacgcactcgctccacgcttggtcctgccttgctgctccctgagttgttgcatcccattgtgctcaggggagtccctgtgtcagctccaggatcttaagcaaataaaacactccaaaaaaaaaaa

SEQ ID NO: 915 - DNA, 107 bp, Homo sapiens
  misc_feature (1)...(107): n = A,T,C or G
acaggtatggggctgganagatggctnantgttttaagagcactggntgncgttgggggnantaggaccaaccatgcgttcaattcccagcacagccatggtaagca

SEQ ID NO: 916 - DNA, 139 bp, Homo sapiens
  misc_feature (1)...(139): n = A,T,C or G
tgcggcgaggaaggcgngccanggggatggggagnctgaagcacancgagngnntcatntgtgactcttgtgggagacggataagtggagaaggccttctataaccgtgggtgagacagngtnctggcaggaggactta

SEQ ID NO: 917 - DNA, 128 bp, Homo sapiens
  misc_feature (1)...(128): n = A,T,C or G
taatgctggtgacaaactaacagaggtcctggaagaagctaacactctgtttaatgaagagtgnggancatgngnggctaccngngatgnccantncctnggagtggcattcagacttgggcaaagag

SEQ ID NO: 918 - DNA, 120 bp, Homo sapiens
  misc_feature (1)...(120): n = A,T,C or G
ggaaactagccaagagaactgncggggcgggcttatacctgacacatatntntggagggcgnggactggnacaagngantgaaaggatgtcnngtgagttngccggggcctgtgaaaggt

SEQ ID NO: 919 - DNA, 106 bp, Homo sapiens
  misc_feature (1)...(106): n = A,T,C or G
tgagcaaacaggtgatgatggttacagnaccacagctgcatgttgccccgaagactccgattattagtttttctcaaagatgttgcttggatctaagaaaaaaaaa

SEQ ID NO: 920 - DNA, 226 bp, Homo sapiens
  misc_feature (1)...(226): n = A,T,C or G
aaaagtcgaagtgaagtggacatggatcctggttttcccgagttctcaaagcacgggtcagaacagaagcacaagaagaacatgaaacaaagacggattcagttgtttgagttttgtacgtgaagtgtttggttttggttttggggtttttttggcctttcttagattttgcaagatctatgtgcatgaaatagctatatcttanataataaacttttttttaaaa

SEQ ID NO: 921 - DNA, 294 bp, Homo sapiens
  misc_feature (1)...(294): n = A,T,C or G
gaggaaacccaggatccgttctgcagtggctcgggaggcacacagatcctgaaggaatcataaaatccagcaagctctcccttcagtttgtttcctcctacacatctgaagcggagatcaccccgtcttccatgcctgtggtcactgacccagaagccttttcatcagagcacttcagcctagagacctatcgacagaatctgcagaccacgcgccttgggaaagtgattctgtttgcagaagtgacctccaccaccatgagtctcctggatggnggnagatttacgctctcgg

SEQ ID NO: 922 - DNA, 105 bp, Homo sapiens
  misc_feature (1)...(105): n = A,T,C or G
ttttgagattccccattcagaccannaatagaagctaaaatgtaatgaagagcctaccaattccaattgtacaagtaaataatctattctggtaacaaaaaaaaa

SEQ ID NO: 923 - DNA, 350 bp, Homo sapiens
  misc_feature (1)...(350): n = A,T,C or G
ggacagtgagcatggctgtactccatctatnggaaagcaatgcaatccgnaaagcataaaataaaactgcnccaagacttgtgggaggctggtgagtgaacctgaacgagaagacaggatagcctgcagcaagagggagtccagaagaagaacgcggagcaagcctgctacccacctcaaggtgacncctncctgncttcttttgnaccatttgtgaagatgtnatgatgcccacttccantgacnntanngtgtatatagggntntgagaaanntaattgtnaaagttttaatttagnccctantttncttaaggacttcttncctttttccaaaaatttgggggtttt

SEQ ID NO: 924 - DNA, 158 bp, Homo sapiens
  misc_feature (1)...(158): n = A,T,C or G
actttggggaaaatggactgttngaacatcttgggatgggacgcgagccaacatgganggtgtatactccanctgnncaagaaaggagacggtcatttcatacgatgtctgtggcanagtcggaggagcctatactcgagttatgatacgacgtatga

SEQ ID NO: 925 - DNA, 445 bp, Homo sapiens
  misc_feature (1)...(445): n = A,T,C or G
ccttgggccccttccttgggggnaaccnttcccaaanggcccccccccggggnnaggannngggcctttgggttnaacccccttggggccttttncntttttccaggnaaccccatttttcccaaagggggggccttattgggaaaagggggttttcctttcntttcaatttaaaaagggcctttcaaaccatttctttaaaanccaaggcccccggttaanggccnttttgggtccaggtttttttggaccaggtncgccnttccaaaaaagcccaaaaagggncccggcnaaaaaaaaaccgcctttttggaaacnggggatttcccgcnttttngggattccctggaaaaattccccggccaaaaccncctttccnaaaattannaagtttttgtntttaanggnccnaaaacccccaaaaaaattggggccccaaaaaaac

SEQ ID NO: 926 - DNA, 511 bp, Homo sapiens
  misc_feature (1)...(511): n = A,T,C or G
tgaggaaaggagcaccgactacgtccctcgttagtgtggctgtcacaaagatcatagcccaggttttggaggacaacctgctgcccggtgccatttgttccctggtttgtggtggagcagatatcggcacaacgatggccagagatgagcagtgtgaacctgctgtccttcactggnagcacctcangnggngaaggaggnggccctcatggtgcaggagaggtttgggaaaagcttgttggagcttgcaggaaacaacgccattattgctttcnaggacncggacctcagnttggntgtnccatcagttntgtntgccgncgtggaaacagntgggcaaaggtgnaccactgtgaggcgactgtttttgcacgaangcatccataatgaagttgtggacagactgagaagtgcctactcacagatccgngnngggaacccctgggaccccantatcctntatggaccgctccataccaaacaggcagtgagcatgtttgtgacgagccta

SEQ ID NO: 927 - DNA, 225 bp, Homo sapiens
  misc_feature (1)...(225): n = A,T,C or G
caccccaaatgacacaaganacggtcttgctgcaaactgcatgaggactctnattnaagagcgctctcgggcccacaggccatacacnangcaggggntagaggaccgcggcaccccaaggngcatggngctgtgggctnnntgnatgctagacactangcactctgccaacggaaccncatatctccaccagganggtnactttnctcgtacttccctatgcaa

SEQ ID NO: 928 - DNA, 183 bp, Homo sapiens
  misc_feature (1)...(183): n = A,T,C or G
tctgaggtgcgatgctatggaatatgatgagaagctggttttaggacgaggtttctgtggagaacttgaccttgncagagcaggcaaagtgttcacgtnagcgtcancaagcgtgnatagtgtnagagggattttgtgtctnanacattgngaatggcgaacaacataaatattgtatatagt

SEQ ID NO: 929 - DNA, 278 bp, Homo sapiens
  misc_feature (1)...(278): n = A,T,C or G
agtggaggggacaatgctnnggtngattgtcaccctgtctgagcacagacaccttttcctttggtcttggcaccttcggagggagtagatcctggaagaggcaggcagtgataccaacatgggcatcccggggtgggagctggccctcatccagactgtaccattccaaccctccttggaaggaggcgcccaatagggtacacgctctaaagatgaagcaggcacaagctttgcctggtgtgtatttatttatttgngaataaccgattgtgctagtg

SEQ ID NO: 930 - DNA, 378 bp, Homo sapiens
  misc_feature (1)...(378): n = A,T,C or G
gagaatgaatgagactggnactactatcgatcacatctgtngcgccattaancaccatatatgatgaaantacatacattgggggtgtgctggaactcagtattgcatacccagctggccttgaactcaccnanatctgntnctggtttntgagngctggggactaaggatatacatcaccacggcccaatntagtnatctattttaaataaaaaatatgcatggaagancaganaantacnnngtaaccaanggnnantnccnggncttnccagggtttcactacatacttgngggtgncctggaactcagtatngtagaccnagctggccttgnactcaccgagatctgnttntgctttntgagtgctggggacta

SEQ ID NO: 931 - DNA, 110 bp, Homo sapiens
  misc_feature (1)...(110): n = A,T,C or G
caccattagcataatgtcgggcggncagnanatanctntntctgtcanttgatangttcntgggtaaattacaaagtatttgtttgagcactttgatcagaaaaaaaaaa

SEQ ID NO: 932 - DNA, 158 bp, Homo sapiens
  misc_feature (1)...(158): n = A,T,C or G
tcatgctcaatgactttcatccatgtgcctgtangatgagctgttggtctcanaggacaggctncccactcccncctgacncgtgcaaggaggtctatggnnngactcatagnccaccctgatgagcccagcagtgngccacagactgataccacttt

SEQ ID NO: 933 - DNA, 111 bp, Homo sapiens
  misc_feature (1)...(111): n = A,T,C or G
ttatcttatccagacnacaaacaancgggccacattctttacatcanatnanatcagccanatgcgngacaaaagttgntancagggccgtggnggttgcatcatcattta

SEQ ID NO: 934 - DNA, 116 bp, Homo sapiens
  misc_feature (1)...(116): n = A,T,C or G
tctgaggtactgaagctgccggttttcttgcagcggccagggtncaaactgaggctnacaactganananagagggggaaaccccccaacatganaacanttgcaagaagataccc

SEQ ID NO: 935 - DNA, 438 bp, Homo sapiens
  misc_feature (1)...(438): n = A,T,C or G
acaacggtattcctcaggtaagccacctatctccatgcctggcatcactgagagtctcagtgggcagcgctagagcgcccccccccaagtcacagtagagcccagtgataccccatgggtggcatcctccagcctcctccagctccgcccccaacagcccccagccgacccctcacctttcctcgntgtgaccaaagcggagggtccagcntgcccgtgcggaagcagcccattntccanacaggagaggaacctgtagcnggtgcccancccttggggaagcgnatgggtgnantctggataccatnctggnntcancnnaannnccgnncnttnnntttttnantgcnncttttttgtaacatnngtngantantgnacnnnanngattgtnancttaaaancatactagngtatccctttgcgtttgttacacat

SEQ ID NO: 936 - DNA, 453 bp, Homo sapiens
  misc_feature (1)...(453): n = A,T,C or G
gactgagggccctgggtncttgagctggcttctggattatgagactgcgatnttganaggaacnnnattgctnagctccngcccncancnntnnntttaatattggactttgcatttgacatgggaggaataacgangngaagnnagatgagaacnggnngaatctactgtnnantccacctacccacatttcgcaaggagcanttgtgggncatgaggcncancntgatgagaccggtgtggccngatnagcccgccggtgntatcagtgtctttgananctngcatgctntnntattaccangaatcaaaaagtcatagaacccttaancagtgttgcctatgcaaatgcttntttttgnacatataagtgcctntttatggatctgaatgtancgttccacatctgaaccaagagcctttgggaggactgtgctaaagcagtgaatctca

SEQ ID NO: 937 - DNA, 164 bp, Homo sapiens
  misc_feature (1)...(164): n = A,T,C or G
ggaagaacacatgtaantctcattacttggaaggcatgagacaagaaggntncncactcatctgcaaggttccttccctgagtctgcgtgtcggcttcctccgantngctgtttncttatggatggccctgaagactnttcttgtcttcttttgatttttcctt

SEQ ID NO: 938 - DNA, 168 bp, Homo sapiens
  misc_feature (1)...(168): n = A,T,C or G
ctcacttctgatccaggngttcgttgatttaggatacatctgctctgttgtacgtgctctaaaaatgaggatagaatcctttgaacgatggctggagaaaacctacaacagagataaaaaggtaaaagcaagggcaatgggggaggaagggggaagaggaggatgtga

SEQ ID NO: 939 - DNA, 503 bp, Homo sapiens
  misc_feature (1)...(503): n = A,T,C or G
ttgacaagtgtgcttttgtttcacgtgttnattcgagattcatggcaggngacgtggaaggattntgtncctccatccatgacaccagtgtctctgctggnntcagagcactgtatgaggagggattgcttctctangtcacatctggntnttgacataccatnngttncaggcccataaagntctnttgnccacccagagngattactntagaattntgttnacagcagncatgaggnaacgagatcaggacaaaatncattngaaaggtctaacagctactgnnnncanncacnntnttnagnttatgtattatggaactatagaactaantatgaacactgtacatgaaatccttcaggcagcatgnatgttcagctttatanaagnggngaaattctgctgntcntttgtcttagccaaaatctgcttagaaaattgngcggaanattangagactgctagatgatttcggcgttaacaccagagggagccagggagaa

SEQ ID NO: 940 - DNA, 193 bp, Homo sapiens
  misc_feature (1)...(193): n = A,T,C or G
ttgaggtgctgctggnaagaggaagtttaacctggctactgtgctacctgacctcgatgaggacacaggcccatggacgccaggaccttgagggcccagggcaggtggaggagccattccactgcgtgcctgatgagatctgcaacgatgtgacactttagctgcaaagccctgcacatgccaaaaaaaaaaa

SEQ ID NO: 941 - DNA, 132 bp, Homo sapiens
  misc_feature (1)...(132): n = A,T,C or G
attgagggcacagtttctccgtgtaactgccctggctgntgctgaaactcactttcaggctgggctcctgagtgctgggatcaaaggngtgcactactcttgtgagcaggaaagtagatacacatagttagt

SEQ ID NO: 942 - DNA, 329 bp, Homo sapiens
  misc_feature (1)...(329): n = A,T,C or G
catggcctgcctcattnaaacagangacagcgagtcaccaaaagcaggncagntgtatgcagganaatgaagaattcccttctggcntctattgtaaactaccngnacagacgcccggatcnacaatnnctgagttttagcagtttattcttgnacanatgnttaaaaatacggntnncctacctggncattgnattttntttaagcnnttcttganggcgntttaatngctgctaanagatatcngnttttttgctataccaagtattnaatgaccttgatggcncaagtgtgactgtacatcnanagagagatattaaaagcaggcc

SEQ ID NO: 943 - DNA, 200 bp, Homo sapiens
  misc_feature (1)...(200): n = A,T,C or G
tcagcaaatccacctgcctntgcctcctgaggagttgggattaaaggccgggtagcaagagcttttctaacagacnntganncctggcccaaanaacccagcaactgcgacaggatagacngcgtgggatgtngcaatcngttncataatganaacagatgagggccgaggacactgttcctaacatactggggcatcag

SEQ ID NO: 944 - DNA, 457 bp, Homo sapiens
  misc_feature (1)...(457): n = A,T,C or G
tgagactccagcgctcactctgctaatttatcgatgacccactttatatactaccactcctgccttcctaggccaagtttgcatgccaacagggacgaaacacaaaaggggancaggagatgctctgntgagacagggcccagacctgcagggcccctctctctactgtncctcccccatggcgtgctcacagnatagcnggnggcgtgncgccagaaggaagatggatcactgntccnatggccnaggaaaaccaagacaagaanggacntntatgactcatggacctgaggagacagggncgcatgaaggtaagagtntggatggccattantgtnacttcgctaangnanctnngcananaccacngngagaggaggaggcagcttcaccgggaactgtcttcgcaacccttctgatggacgaggtggnaggagcancagacttgagtactgtg

SEQ ID NO: 945 - DNA, 183 bp, Homo sapiens
  misc_feature (1)...(183): n = A,T,C or G
ggaacagtagacaaatttntcggacaggacgagtcgggccaaatgcngggaccctgnctcaaattngaggaggaggaagagccagagagagaaanggaggaggaaaagggccnggagangganccggccgtgctgacacnngacngaggaggncgaggnggaggaagaagagcaatgaggagg

SEQ ID NO: 946 - DNA, 273 bp, Homo sapiens
  misc_feature (1)...(273): n = A,T,C or G
caggatacacctaagcctcantgccagggcggcagcnacggctgactcccagggcatgctgggctgcctgttcagccantgggccannttcaggttcagagaaagagcctgcctcaaaacaggaggtggagagcacanaggaatgnggaggtttgtatatgcctgacacagggagtggcacatattaagaggtgtngccttgctggaggaagngtgncactgtgggggtgnnctttgagaccttgctcctagncacatgggagacagccttct

SEQ ID NO: 947 - DNA, 419 bp, Homo sapiens
  misc_feature (1)...(419): n = A,T,C or G
gactgaggttcggcgagctgatggacacttaaatacaagaagaccgcagaatcaacacggtctactggcaatttcactggaaatttttacagctggaggagcttcctagaaagggaacccacttttaagatcctgtttcaactgataagcactaagaaatgcctcagtcccaaagcaacactaaacttctcagcaagtctggcccgactttgcaagacccacagggtggattgaatgtacgaccagtgtttattataaaggaatgctgctcaaagacacacaactnggggttttaaattggcaactttagggaagcattgcttgagcctcaagaaaagccctcagttcatttctcgatcaaagaaaaatagtacagagaaaaccatctgcttttgtgccttaaaggaaattaaaaaaaa

SEQ ID NO: 948 - DNA, 110 bp, Homo sapiens
  misc_feature (1)...(110): n = A,T,C or G
cttgtatctctggcatgaagccttaagtagtcacagaagatgatcttttggaagtgttcttggattagtttgctggngntttattaaatgtttttgtatctatgttcata

SEQ ID NO: 949 - DNA, 326 bp, Homo sapiens
  misc_feature (1)...(326): n = A,T,C or G
ggagagctcccattttacagatgctggtgtgccttaaaaacagagtcaaggaactgganacgccgggttcttagacttgatcctcaacacaacacctctatgcctgccattttctccttggctgacttgttncacagcatcaggaacccattaagcacaacctttgactgataattgataatattaacaagcatttatatcatagatgtgatccaatnatagatactttaaatatttcatatgtatataatattnagatgaaangaaatattaaatattttatattatattaaataaatactaancatattttaaagtttacaata

SEQ ID NO: 950 - DNA, 434 bp, Homo sapiens
  misc_feature (1)...(434): n = A,T,C or G
gaatgaaggctactggatgagtcccgntcagccctctccctggacacaggaacctgccaactntcctgacccgactttcccgaaaccagtgttctcagttagcagggagaagcccctttaaagagctgtctgtcctaagggaacaacttaatgtttaaggaatcgttttttaacattcactaaaatagaaaaatgaagtttaatgatcacgcaaccacacaccctccacccgtcaccaaactgtctacaaaattatttcagattaatcggatacatgtacttttagcttaccgaattctagaagaggtggaagggccctattggagtagagcgaatgactgcataagggattagtctgttttaaacggctgtgaatgaacctgttatcaatgggacagaaggggcctcccccttcatgcccctcccagacttct

SEQ ID NO: 951 - DNA, 129 bp, Homo sapiens
  misc_feature (1)...(129): n = A,T,C or G
gattgaggagtcagcagtcngaggatnagtcagtggaagaggaagaggaagaggaagaggangaaggatgtctgtgagtttaaggccaacttggtctacatagggacaccctgtctccaaaaaaaaaaa

SEQ ID NO: 952 - DNA, 283 bp, Homo sapiens
  misc_feature (1)...(283): n = A,T,C or G
ggaggctgtctagataattactgcagaagggaaaattatctggatagatgaccaacatccctcaaaactgaaaggaggagctggcaacaacacagaagcatgccttggaagntcacagatganaaatcagagctcaaagagcattgccctncnnnnnnaagtgtgcagaagaaacctggacctaaaaaacagagctttgtactttcccagtctgcacatgcattcctagagccagnggttcacgtgtnnggaaacttggcagggaagccggcacccttttttc

SEQ ID NO: 953 - DNA, 483 bp, Homo sapiens
  misc_feature (1)...(483): n = A,T,C or G
agactgagacagagcacttaganctcacaggaccttttccctctcgtggtaccttctgggtatggaggaaacgagaagccaagtgctttggacaaggctggaagctgaagaggcagccctgcttgcgggcttaagcttccagaatggatctcctgttntcgtctgcagggagaggctgaaatgcccaggagagatctccacatcaggcatccggaggaggcagaagagaggccaccactgttgggtctcacactccattttggatttgcctttgaggatccccacccccgacttccccaaggggaagggctaagggaaaactatttagttggtgaaccctaccttaagacgccagattctggcacagtcccctgtcaagctagtgcaagccatctgggagaaccacatgggccctgagcttccaagagaccctgaaggctggaaggcggacattaggaaataaatactttacctctgtcaaat

SEQ ID NO: 954 - DNA, 181 bp, Homo sapiens
  misc_feature (1)...(181): n = A,T,C or G
ggaacctagggcctgtttttatggaagaaccgcagngngatgantaagacgggcagctgacaangntcgcgcgggangcaaggcccggctccaggaacaacgtcagcaaaacccagagangaggggaggangaanggaaaagannccngangnncngtnccngacctagagaaaaagccac

SEQ ID NO: 955 - DNA, 113 bp, Homo sapiens
  misc_feature (1)...(113): n = A,T,C or G
gctgggcctggggacactgctcccctggaatttttttatgaccgcaaccaagtatttnacaaaccagactggacggtgtcccagaatggggcctcgncactctgctcactggg

SEQ ID NO: 956 - DNA, 463 bp, Homo sapiens
  misc_feature (1)...(463): n = A,T,C or G
cctttttcttactgccatcctttcctttgagntaagcccaacctggggctccatnagcccccaggtttcactctccctcccagctttccttccacaacttgctgaagttcatcaaggagcgagcntggtacgcctgcgtgccctagacctcagtggtactggtttgccaccggaggccctacaagccctgggccaagtgactggattgaagttggaggagctgnatctgcacagctgcagagacctctcctcagaggctgtgaccatcctgtgccgccagcagcctggccttacttncctagaccttagtggctgctcntacctgaccgaaggggcactctnggctgtgagccgaggcctacntncacctgcggtacttgagttctgaagaaactgtaganactgacagatgcanggtgnncagccctaggggccctgcntgaatngcagagcctacacatgg

SEQ ID NO: 957 - DNA, 397 bp, Homo sapiens
  misc_feature (1)...(397): n = A,T,C or G
gactgaggactgttgaggcctggaagtccctccccttccccttccccctttgccgctttgtggcattcccctccctccttccctccctccccccctctcttaggaacagtattggccttagttcctggcctacctgctgccttccctctcctcctgccagctctcctgccttcgctggagctctgttgggcttgaggggttttgttctctccctcccctcccccgttaccttttttcttttgatcagtttttagggggagggctcaacatttttgcctttatatttctttcctaaggaagcattngcctttctttcactctcctaacataacaatcgtggtaacagaatgcaactgctgatttatcgatgtatttaatgtaagtaaaaaaggaaaaa

SEQ ID NO: 958 - DNA, 109 bp, Homo sapiens
  misc_feature (1)...(109): n = A,T,C or G
cgcgcaccaggcgacgggnncaccagcaaggccgggngggaaggcgggangccngcccccacancacncataangtggacggcnaaacaacnaggaaagaggagcccta

SEQ ID NO: 959 - DNA, 106 bp, Homo sapiens
  misc_feature (1)...(106): n = A,T,C or G
gactgaggcacactgtcactccactacccatccanacacgaacaccgntntcatgggnaaatcccanacactcatngctcagncccaggactcagcctgcagagta

SEQ ID NO: 960 - DNA, 197 bp, Homo sapiens
  misc_feature (1)...(197): n = A,T,C or G
attgaatggccctatcagtctgnancttagagtgaacacanngtgcatactcgngcaacagganccacnactccgataggnatgnanaanaggnatgttntgtnnaaccgatgtttcttggttgcttgatactgcaatgtgactcccctcgccccccatgaatacaaagcaatgattctgtctcttaaaaaaaaaaa

SEQ ID NO: 961 - DNA, 164 bp, Homo sapiens
  misc_feature (1)...(164): n = A,T,C or G
tggcccgctttacgttgngncctcagtctgacaaaaganacnntaagnaaggntngttagcccnnntgcaaanagcacnnacatgatccttcattcaagagtttaaccattnctaacaatatggagttatcattaaatcttttttaaagtgtgaaaaaaaaaaa

SEQ ID NO: 962 - DNA, 158 bp, Homo sapiens
  misc_feature (1)...(158): n = A,T,C or G
ttttgaggaacgaggacactgttttcgntgnntcccgagctgaagattgccacctgaccttcagagagnttnctgggctctnccncctcccttggagcctncttttgcttatgctnatatngacactnctgagtaaagttnttcagagcttgaaaaaa

SEQ ID NO: 963 - DNA, 140 bp, Homo sapiens
  misc_feature (1)...(140): n = A,T,C or G
acccagaaaggtcatgaaattcgcgtggaaggancacaaggctgctttcaggagcanagtttcactgattccaactngaaaactttcaaacagcgtgtgtgtgcanaaagatatgcgtggnatggggacagtcatgtttg

SEQ ID NO: 964 - DNA, 150 bp, Homo sapiens
tctgagactccatggttaaataaacgtcaactgtgacatagtagaggtaagagcatcaacttgtcagtgtgaagaggtcatgttctgtgctcaccattgtcaagcagaaatttgtttctaatatattcacccacatcaaagaacaaaaaa

SEQ ID NO: 965 - DNA, 183 bp, Homo sapiens
  misc_feature (1)...(183): n = A,T,C or G
acattctctttgaagcattgtttcctgggtcttcctactcgactctgaagtgtttcctgatccagaaggtaacatccaaacagtgtatcagatgcttttgaatagtnggtttttataagcttgtaactttctcaggggatgattttggatcagaatacattttattcctttatggttccaaaa

SEQ ID NO: 966 - DNA, 200 bp, Homo sapiens
gctggtatgggttttaatgtggagttttggccactgcatcccacaccgcaaaagccagcttagttgtcctttgacgtcttcagacatgctgtagcatggctgagcctgcactcatacgcatgcgcacacatggcaaccggcgaccgcggcatggcagcaacgccgcccaccgtcggtgacaagaagttgaactgcaagct

SEQ ID NO: 967 - DNA, 446 bp, Homo sapiens
  misc_feature (1)...(446): n = A,T,C or G
ctcaataagctgaacaagacagtcgtctctncagtgctccagaatctgacttgaaaatccaccatggcattcctcaatggcatgatgggagagaatgacaggccccatgtggtcacctaaagaaggaataagttccattntgctctcctactctggggtctgctaagtgagccatgacacttttccagattcacgaagttcacatgcagtctcttggcgacttttttnaacaacatntttatgagattcattcatgttgatggatcanagggtctggctacaggctgntgttgtgaacttnagttctgccgaatgtgctcggatttctgtcttcagagacactgacagctctagtgctggacctgaactnctntngnancaccngccatgtccngcgcctgnggcnttaatgacttncataaaactccttactcccagtgagataa

SEQ ID NO: 968 - DNA, 118 bp, Homo sapiens
  misc_feature (1)...(118): n = A,T,C or G
cttttgcaaaaagtaggatgggaaaatcataatcacgtcagttaataacacgtattcccagttccaagatgnatacagcttatangaaggggntgaaatcaaagccagtttgcgattg

SEQ ID NO: 969 - DNA, 119 bp, Homo sapiens
  misc_feature (1)...(119): n = A,T,C or G
cacccaaggagaaagaggaactggaccggggctgcngggagngcaagcgcaaggnanccnagtgccagcagcaagcttganggagcttggaagtggcntganagctgatggccaggtgg

SEQ ID NO: 970 - DNA, 102 bp, Homo sapiens
  misc_feature (1)...(102): n = A,T,C or G
gcccgctggacacggacgctggananccctnccatgagggataaagaagaccaangagnccntgcagganggcangcgtnncaggagaagtcaaaaggctgc

SEQ ID NO: 971 - DNA, 257 bp, Homo sapiens
cgagagcccacccctagcaccccggagaatgaagagtggagcagaagccagctgggaaaaccaagaagggggatcttggactggttcagagcaaggaccaaatgaggagcggtggagacagactcaggagctggaatcaaccggactggagggttctgcggagtagagcgacatacaggccactgccaggttcctagctggatgaatggataggcatgccactgtttgcaataaacaacctcctaaaggaaaaaaaa

SEQ ID NO: 972 - DNA, 210 bp, Homo sapiens
  misc_feature (1)...(210): n = A,T,C or G
taaagtatgaggcaccaggtccaagtaagcnagctcngtgcacctactacgnctgcaggagnagaagggagggatgcatgagggcngggacaagttatctnnactgtgtgntgncatnggttgngagnntnagtagatntggaacagtaacctcgccncnganccggctggagaaatgaccgacnctncttacaatcaaaacagtcccct

SEQ ID NO: 973 - DNA, 273 bp, Homo sapiens
  misc_feature (1)...(273): n = A,T,C or G
gccaaagggagcctaggggccctctttctcacaatcaggatcctggtcctccacctgaagtcttcagaaaccttgctacccagaatgtanacacggctggcagnttcgacagtgtgacctgatgtctggtttgcagcacgaatatgctgccatattctccccaggctgtgtgcttccttccttccgggcagcagggcaaatggctgcttatgtattcatgactgtgtcactttgaggacaaagttctaagactgaaacagcaacaaaaaaaaa

SEQ ID NO: 974 - DNA, 147 bp, Homo sapiens
gacggaaagcctgactgacgccacatttaataatggctctgcatctaaacacagaaggacaagtacatgttcatgaggaaaaactacatgtttctctgtatctctgggaaagctgggtctaataatcatgtgtgatgatttacaaaa

SEQ ID NO: 975 - DNA, 312 bp, Homo sapiens
  misc_feature (1)...(312): n = A,T,C or G
ggttcttgcagtacgatccgtattggtcacactggaatggagactgagcacattgttgacaacatcctagctgtctcanaaatgctttcanaaaaattgccagagaaatggcanagtgtgaaactgttgttcctgaaaactganaagtcggtttccctgcccatcttttcttcatttgtcacatctnaggatgaaaacgctgtttccctccgtagtttgaggaagcaagaactnnaganaagatagcgtgaaaatgcanagttgaagaaggaaagcacaatgttaaggnagaagtccaagaaggctacatcc

SEQ ID NO: 976 - DNA, 105 bp, Homo sapiens
  misc_feature (1)...(105): n = A,T,C or G
gttcgagctgggctaaattgccnttnaccaggatctgtggntcncccacctcangnaatgncaaactgncnaccatcaantccggtgcccgtattcgtttacctg

SEQ ID NO: 977 - DNA, 118 bp, Homo sapiens
  misc_feature (1)...(118): n = A,T,C or G
tttgagcctgggcctatntgttcgngctgatcagnaaccatgatgggctgnaactggactttctccgtgagccggctgcttgtnatggatccaagacnagggtgcgctgggaaggcct

SEQ ID NO: 978 - DNA, 223 bp, Homo sapiens
  misc_feature (1)...(223): n = A,T,C or G
actctgccggcctcctgccctgaatttgattgtgccttcctncctcccttctctgtncttgnagctgggggaggggcagntgnnctcggacttggntagtnagtttattgaatggatgaacnancactnccgggggtcccttccgggggaaagctgtttcagccacaaagcaatctcattccactgttttcagcctcaaaataaaaggaaacttatattgaaa

SEQ ID NO: 979 - DNA, 198 bp, Homo sapiens
  misc_feature (1)...(198): n = A,T,C or G
gatctgagcaggcactttgccgacactgggncagatcacttctccagaaggccagcctttgtggcggtgagcatcccatctctaaaatgcctgtgtctggggaaggtcagttttaaagcttctggacagagcgaggtgggacgcaaccatgtgtttaaataaaacagatcttttgacacagagacagataaaaaaaaa

SEQ ID NO: 980 - DNA, 124 bp, Homo sapiens
  misc_feature (1)...(124): n = A,T,C or G
cagagtccctgtaactgttanacatgnacaccgttcgtgattgaaggtggannaacanggcactntcaccatcaggnttacttatgcatgggagggaagtnggcagtatcatcggaaagaaagg

SEQ ID NO: 981 - DNA, 149 bp, Homo sapiens
  misc_feature (1)...(149): n = A,T,C or G
acgactgaccaaggccactccanctgcnngagaggaacgtngncggggcgaaagaagaaacgggagccacgacatgnntcatcctgnccaaagnatnanttttactngttacnncattcagtcaaaaaggaagtgggagggaaccccat

SEQ ID NO: 982 - DNA, 281 bp, Homo sapiens
  misc_feature (1)...(281): n = A,T,C or G
tggaatacgctatgaataccatgcgtggtcttcnccatcngcaganntganatgcgnatgcctcccnnagggngggannaanggngngngncaccacagcccagncaagaagccactcgctaccatgcctggccatctgagttctatcttggcactgttgaatgagagagccaactcccggaagttgtcctctggactgcccatgcacaccatgtagtgtgcacctgcacatagatacacactaaacaaacaaacaaatagatatgttttaaaaaaaaaaa

SEQ ID NO: 983 - DNA, 327 bp, Homo sapiens
  misc_feature (1)...(327): n = A,T,C or G
ccttccccccaccccccccccttnaaattgcccagggnnaaaaggttaaagganttgggattttgggggncnttaaaaaacccccttggttttnaaaaaaaaaccccaaaaattttttcccggttggnaaannaaggcccccaaggggcnttggtttttggtnggnttttgcccaagntnggccatttttggttggttttggccaaggggaaattttggggggnaaaaggggggcctttccctttgggngggcctttaaagntttgggccgnccttttgggcanttttgggaatttngggaaattnggccggggaaatttgggaaaa

SEQ ID NO: 984 - DNA, 143 bp, Homo sapiens
  misc_feature (1)...(143): n = A,T,C or G
ggggggggggtttttcgggcccccctttttggggtttaggggggggnaaattaaaaacccccacccgggaaaagtttcccaaaagggnaaaanggnaccacccatttcccccntttccttttgggtngggaaaaggaaaaaaa

SEQ ID NO: 985 - DNA, 196 bp, Homo sapiens
  misc_feature (1)...(196): n = A,T,C or G
tgaggttgttgagacagcatgaatctactgaagccactgctgtaatacagaagagtttaaaagccaggaagtctgggctcacactgctgctttgggtcagttggagtctcttctctgtgtagaaactgagctgctgctgcttacagntctgaattctcccgtttggattgtgcttcctacactctccataggtaat

SEQ ID NO: 986 - DNA, 501 bp, Homo sapiens
  misc_feature (1)...(501): n = A,T,C or G
atgtgagaggacatcaggaagcagnagcacnctnctgagcggaactcacatgtgacanatgtgagnnggcngnnnangcggcactgnngtnnatgtnaccattnaactagntacgtgcncaggtnngacttaatgcaggtagctccaaggnaaacggcctgcacactcctggacggtcctctgccctccccctgtggtggctgccgctcactactctgacccctgtgacagaggccaaacccacctctttatgtgcccatggggcctcttctggctttaaggcttaaacgatttttccagtttctaaattctgcatgaaggctgcaggtgacccattttggctcagacgctgtgaccagagcaaatcaactccattggccatcgtcactcgtgattgtcatctgaggggcagcctcgggagaagattatttatatatccaaagacgaaagccagactgcagcacagacaagctgtcagacatgactccctgccctttaact

SEQ ID NO: 987 - DNA, 142 bp, Homo sapiens
  misc_feature (1)...(142): n = A,T,C or G
ttactacggcactaactgaaggagaaacatcccgncaaagcttacaacaacagggaacagnnncaacaacaacaacaaagtttaccaactcattagcgtgacccagagagaattacagnctgaattgacacgtacccacatg

SEQ ID NO: 988 - DNA, 163 bp, Homo sapiens
gactgagggaatgattttgcatgactttggactggtgtctagtagaacacggtgggagaatgaacacagaagagctagagttattgagtgactccaaatacagaaactatgtagctgccattgacaaagcactaaagaattttgaatactccaaaaaaaaaaa

SEQ ID NO: 989 - DNA, 183 bp, Homo sapiens
  misc_feature (1)...(183): n = A,T,C or G
accatcctgtgaattctaggtggatctctgcctctgagtccaaaacctcagccctacatcttttctcttgctgctgagcagagctcattcttcttagcatnaccagttctgaagatgcntgtaggagggagggcttattcgggataatttcatgaatatatgtaatcacttcaaaaaaaaaaa

SEQ ID NO: 990 - DNA, 256 bp, Homo sapiens
ctgctgtgaggatacagggtaaggaagcgggccaggcctgggagaagaaaagactctggggagatggcatgtaatctggttcccagaaagcctggtgggagagtggactggatagtggtgcagaccatgcaggagtggacaagccaatgactacaaaacatgattgtcaatccagcttcctgtagcctaagagatgaggagtcaattatttgttgcctggtcataaactacttttttcccgacgtaaaaaaaaaaa

SEQ ID NO: 991 - DNA, 114 bp, Homo sapiens
  misc_feature (1)...(114): n = A,T,C or G
atttccaccccgcggatccagaggcttgaatgagctggnggnncnaacncagtgtaaaattgngtttnctggaccagattgnaaagtatgtgggagctacaaggaagtactctg

SEQ ID NO: 992 - DNA, 190 bp, Homo sapiens
  misc_feature (1)...(190): n = A,T,C or G
gaaggaacagactaccagnaatcgagcagctttcctgcagattattgcacatccttgagctgagtgactgcgatttgccaaaccattgtgcattccaagcctgactagtcagcttagttcctctcctgcttagttttgaactagtaaacagaagtcataaactatgagttaagtctgtgaaaaaaaaaaa

SEQ ID NO: 993 - DNA, 108 bp, Homo sapiens
  misc_feature (1)...(108): n = A,T,C or G
tacatcggaactaccatctccantatctagaaganaaagacatcccaccccttgnatntccgangtcctntgnggatttaatggtgcctaatgagcatatagtgaatg

SEQ ID NO: 994 - DNA, 190 bp, Homo sapiens
  misc_feature (1)...(190): n = A,T,C or G
aaattggggaacccccttacccttgggccnttcggggcccccctttnccaccccccttggnaaaaattggttaaccgncccttggctttcccaaaggttttccggttcttcnttaacccccggcnttcccctttggattccaagggaggccacccttcttctttcaanggangccaacccttcttcaagc

SEQ ID NO: 995 - DNA, 385 bp, Homo sapiens
  misc_feature (1)...(385): n = A,T,C or G
gtgacccatgtgactttactatctggccaatgataaagaaatgggattctcgaatggagattatgaaagggtatttcaaggatgcaaccttctccagccctttatcatctagctgctggagagccgactacatggctggtgctctgacaaccatcccggaacttgggtaagacacgacagagaagcaaacggggaaagaatctggcttcttggtgaccacgccaacctcggccttctaacctcccggcttcctttgtgtgagagaaaatgaacttgtttgaaacgattgtcatttaaatgccgntnccactcntactccacccaagtgggtcctttccccgactnggccaataacaccagtgtttacgntctggaaaaaaaaaaa

SEQ ID NO: 996 - DNA, 230 bp, Homo sapiens
  misc_feature (1)...(230): n = A,T,C or G
ccttttgggcctttgctngggaaaaaacncccttggncncncttggnggnanttacanaggggtggggcngggaagcccttggttttggtcaccaggagngngccttatntaaaaggccggaccgggttccanggggccttggggattttttgggattggaattggaangatanggaaagntgggaaccaccttaaaatttttttngggggganagccggatgggattgc

SEQ ID NO: 997 - DNA, 149 bp, Homo sapiens
  misc_feature (1)...(149): n = A,T,C or G
caagcctgcaagttttnactaattgaccaagaagtgggnggngacaggagctggatggtgtttaatgaacgctgccgagntcacttnaagcctccaaagaatgagnagagagagagtttttntaanaactcaggtcatcttattgcctg

SEQ ID NO: 998 - DNA, 107 bp, Homo sapiens
gagatggcggactccgcacgactaccaattgcaggaggcgccttggccggaggttctcgcccagaaatgtatcaaaggctgaccaatgagggcgccaaaaaaaaaaa

SEQ ID NO: 999 - DNA, 164 bp, Homo sapiens
  misc_feature (1)...(164): n = A,T,C or G
aagatcctcacctcccatcatgcgncacccctcccnanacgcctccattaaccncagactatgtacccgntggccctagcctctggcanagcctgttcctggccaaactgtggatncagccnggaggggcancgaacngttaccttccttccccttggcattaa

SEQ ID NO: 1000 - DNA, 191 bp, Homo sapiens
  misc_feature (1)...(191): n = A,T,C or G
ggagacccggctcataanccaccaggcncagangaaagggttacagcngaagccngancgccgcccacngaggagtaagaggaggcgatgagcgccaagccggccagcaagccnggacccccnnccagaangcnggataagaaccactgacggnccgcctgcngngtacgagaggaaccaggcccagactc

SEQ ID NO: 1001 - DNA, 560 bp, Homo sapiens
  misc_feature (1)...(560): n = A,T,C or G
gactgagaagggccaaataaaacaccggtagcagncatnngnctgaccagctaggtgaccatggcctttgtcctggtgggncaggtgaatgttctggcgcccgnngtcacnatcanttgcatgctgacctacataatgggggactactnattacttcgncctctncatggctcacgtgnngnctcnccccatctncngancccgtccccanacaaggcccatatactctgcactgctctgagcacctgctccaggacagggctcccagntacggcctctgatgtccctgccagaagcctctctgagggcaccctgctggagtncaccaaggacatggatcagntcctccagccaatagaggaactggagagtcgnnancttgggncanganaaggaaacaacccanagaatcattaagcgcaagggtaagaaaggcgccaagcanaccctacaagatagntncctcttgnaccctgnntctcctttgtnctttcctacnaggacttntnaaaggttgncngttgccttctgtggggagcaagagtcctatcagaaaaatg

SEQ ID NO: 1002 - DNA, 303 bp, Homo sapiens
gactgagccaggcagtaacagacccatgatccagtgtgcagaggagaagcctggagccggggacccagcgaaaccagcgtcttcttggagtatggttctctctgccccagtggaaacccttccagctgagcgggggctctggctggaggagagcaacccacccaccatggtgggtgcagcctggaaccagggctccatcctaacacacgcccatgcttttcagtccagataccttttgacagatgacagaagcacttttgatacatgatgtgaaatatactgtattttagaatcagaatatat

SEQ ID NO: 1003 - DNA, 106 bp, Homo sapiens
  misc_feature (1)...(106): n = A,T,C or G
cagtgtccagcactcatgaaggaaanagctntgtangccggcataatatgggctaccctacctntgtgtcatcagacaggaatctgagtncaccaattaaatccat

SEQ ID NO: 1004 - DNA, 113 bp, Homo sapiens
  misc_feature (1)...(113): n = A,T,C or G
tttgcgggaaccggccgccaggtttnggggngagaaccccccacggaagggagaggacccaaccggagcnatnacccagggggcagaanccccncgggagaggcgcccgcagg

SEQ ID NO: 1005 - DNA, 134 bp, Homo sapiens
  misc_feature (1)...(134): n = A,T,C or G
cattagcacaccacacgngnncnggtggnaaacnagaccccgnaccgggcgcactcgtnggtacatgntacangtacttcancataaaggccaatctggtgttnccctccgaccttccttacataacctagatg

SEQ ID NO: 1006 - DNA, 222 bp, Homo sapiens
  misc_feature (1)...(222): n = A,T,C or G
gggacactttacgaccgagtttttaggnggaaanccaatggggagaagagaggactcacccactaagcttttacccantctgtacacacccgactgcctgcgtcctggtatgtgcctgtgtaagatgaggaaatgagactcctcccctttctcctcctacctgacccaagctggcttttccaatacaagctngatctttatgcgtgtgctcaaaaaaaaaaa

SEQ ID NO: 1007 - DNA, 163 bp, Homo sapiens
  misc_feature (1)...(163): n = A,T,C or G
aaccgcgcgccccctttgcangggaagaaccgaaggagngggcatcctcnaagataccccaggtttgtggnngcgaggnagnncccgcagcnttnnagaagaagagtagccttgggccatggcccaggcaancancaacagngactacagcagagcagggctg

SEQ ID NO: 1008 - DNA, 227 bp, Homo sapiens
gagtttgctcttggatgtgaaggaatccctctatctcttggagctttttcttatctatcaaaagaatgagctggacaagatctgcaagagttattcctcaagagtttccagcatctgggtttaatgatgacctctgttgaagacaatgggggacaaggatgaggtggtggcattattttattttccaaagttctgaataaagtggattggcgtgaagagaaaaaaaa

SEQ ID NO: 1009 - DNA, 267 bp, Homo sapiens
  misc_feature (1)...(267): n = A,T,C or G
ttatggggtacaagggntgggttnccgactgaaaacngagaacagctgcttgatggacgggacaggttttntgtnaggcggaanagcttcctcgaacacctgtgggtatttaggaaggcgaggttttagaattgctgtctgttgacaccaaaggctcaagaacgagtaaggaggggcgggagactccttggtgcaatcttttttacagcctgatgtgtnttttacgtgtcccttgaagnngttntaagaggcggagaaaatgactaa

SEQ ID NO: 1010 - DNA, 150 bp, Homo sapiens
  misc_feature (1)...(150): n = A,T,C or G
gctccggggttggagcgttnctgttcattcngtctgccacagcccacgtgatggaacntgcggngccacgacgccntgcacctttntacctggaccagtagatanatctgggtgggaanncgggtgccctcccccttccttgatacctgg

SEQ ID NO: 1011 - DNA, 245 bp, Homo sapiens
  misc_feature (1)...(245): n = A,T,C or G
agccagtctattttgcctgagcacaggattcgaaactcancattggcaccggccancaganctaccctncgaccnncagggggtncccatggagatcaggaggacagccggtgtcnggagccaggttntcttcctttcatcangngggttccattgatcccacatctatcgttgacgctctccacagaggtcacctttacccactgagcnatctccccagctcttactctgtattttctaaaagt

SEQ ID NO: 1012 - DNA, 318 bp, Homo sapiens
  misc_feature (1)...(318): n = A,T,C or G
ggggggaacgacggaggccagcngagacacaacactggggaantaaggccgnanacnctgccanggacagcgacangctgagagaaccagggaagcctncnaggcaaaggcagcncatggcagaanacagccaggcacaacgcagataanagaaggaccncagcacgcaggccagtccacactgtggcccagcatcaggcaccgnctcngnggcgcncnaaccctcaatncgnaaacgagnagcnctcnaggnagaagaccanccctcacaggctggggaaccgcatgtgccngggagggaaccaacgtgggactagg

SEQ ID NO: 1013 - DNA, 113 bp, Homo sapiens
  misc_feature (1)...(113): n = A,T,C or G
ttagagcctgtgcctgtgccctgggccttttgnnnagtagctnaaagagaggggnttctngcgaaggaccntgtcnatggagcatgacngtatccaactcgtttgatgtggta

SEQ ID NO: 1014 - DNA, 143 bp, Homo sapiens
  misc_feature (1)...(143): n = A,T,C or G
gtatcaccacaccagtantagcancctgtggctctgtcgtccctgaggcctttatgnnnagtagcttaatgaagagtgggtttcnnncgaaggtaccatgtccatgcagcatgacnagtgtccaactcgtttggatcgtggta

SEQ ID NO: 1015 - DNA, 368 bp, Homo sapiens
  misc_feature (1)...(368): n = A,T,C or G
actgaggtgcagtgtgagctgctgcctcctgctcctgcagccatggtggtcttgaaccctcacagtaggaccagaacaaatccttcttccttctttactaagtcgcttatgttttatctcaataatgtaaagttgggtattttatctcaataatgagaagagtgacaagccatccgcctcggtgcatgcntgctgtggatgaacatgtgtgcacttgtgtatggcgacagagactctcttagacaatgctcttcaggggcctggagctcaccattagggtagcctgatgccagccagccccagggattgactgttgctgtttccccagcactggaattaaagtgtgcatgctgccttaaaaaaaaaaa

SEQ ID NO: 1016 - DNA, 434 bp, Homo sapiens
  misc_feature (1)...(434): n = A,T,C or G
ttgaggttacacatgctgangatgtatgttnaccccctgatcctttggcctctcaagtgcaggaattacagggaggagccacactgtgggtgagtcctccggggccaggaagaggagcactgtcattttgtctggtggacaaggagacggggctctggatgtgtactgacgcctctggggaccagggtcagnctggggacacgtcacggggtctactccagccccanagggggcacaacctggngcangacggnagaggaaagaccacgacagaggtgacccccacagnagtgnctcccggcagcaccgactgctttctgctttacagaataagcttctggggcantgtctgaccaaaggtccanaacaccgtaattgctttacccaaaagnattcttttgagcaatcttttncccaaaagctattttgcaggt

SEQ ID NO: 1017 - DNA, 192 bp, Homo sapiens
  misc_feature (1)...(192): n = A,T,C or G
caccggaaacagttgaagatttggaancactctgctctgagcgttgcctctggcttgcaagctcccagagatgaagagcctcatccaaatgacctgcattaggagtcatcggtaccccaaccccttcttaaccagaaagaaatggaggcattttcagtaaaaattaaataacttgctcttgaaaaaaaaaaa

SEQ ID NO: 1018 - DNA, 272 bp, Homo sapiens
  misc_feature (1)...(272): n = A,T,C or G
tgcttctactgacatggagaagattgaggaccagtttgctagcctgcatattgttaggaggtcctcgtcactctgctnactggagcttgagctcgagtcctcagagncaaagaccnngacaacgntaaaanatggaggcnttggcgncctgtgctcannntcatntggnnctatangantatatgataaggacacactacntctgntncnanaatttggnggccngtgccnggcttcttagtggagtcagcntttgcaaattcctgtgacag

SEQ ID NO: 1019 - DNA, 238 bp, Homo sapiens
  misc_feature (1)...(238): n = A,T,C or G
attgagattaccagccagaggaagatangaangagccgganaagacngnctacttgtagcaaganagntatgctgcaccatctggtctacgctataccagaaaatantgngtttnaggttnngcagatgtatctaatccaactgccttaactncaantatcagaatcctatgctttccctatatgaaccaggatgccatgtagttgacagactggatgatcttgacgttttctaagat

SEQ ID NO: 1020 - DNA, 139 bp, Homo sapiens
  misc_feature (1)...(139): n = A,T,C or G
cagtaaggggagagcatngnctccctgtagtgagcttcttcnggancatggaaagnccnagccaacaggctgggaccccatanatttgctatgananctnacaatgctacatgaatagcttaaattacttactgcaaga

SEQ ID NO: 1021 - DNA, 222 bp, Homo sapiens
  misc_feature (1)...(222): n = A,T,C or G
gcagctacgggcaagtggacaatatcccagcagtgacgaaagctgaggatnagaagcccagnccngggagccgtcancatcctctnaccnccaggctggccagngagtgtccgaaggagcncataccaccngntcanaggcncgcanggctgcacacaagagacagatctnacnttgtgaagtttancngacgcanactcggngctaccgccacacgaagcg

SEQ ID NO: 1022 - DNA, 277 bp, Homo sapiens
  misc_feature (1)...(277): n = A,T,C or G
catccccatccagcctctcactggngcctaggcccagcttgtcggctgactggcccctacgcagcctaggagaccgggcgggtatggggatgtgccccggaaggggggatggtgagcgtggngggggcgtggncacgggcgggcaggccagcggagatggagggatactgcttgtggacttgcgnngaccgctcttgtgacgaggtggnccnagcttggctgccaggccatgcagggagctgggacggctgngaccagtgnctggagaagcggggct

SEQ ID NO: 1023 - DNA, 205 bp, Homo sapiens
  misc_feature (1)...(205): n = A,T,C or G
tccaccataaggaaccagtggaagacatgcntctatagaatgatgtgtggggccaggaanacaaaggaagtcggggcanggatggataaaggagggggctccaaggatgcantgaagatggatggtcgtcctaaaccccgtttttctaatttaacgntgccttctgaacaagagacaacaactctctcttccctaaaaaaaaaaa

SEQ ID NO: 1024 - DNA, 155 bp, Homo sapiens
tgaggaaggtgcaatggcccagtatttatctgtaatcatgatcttgacctttgccctttgggttacaagcccccttcatgaactacaatcaacagctgctttctctcagactactgagaaaataaattcaaattgggaacctggagaaaaaagaa

SEQ ID NO: 1025 - DNA, 422 bp, Homo sapiens
  misc_feature (1)...(422): n = A,T,C or G
ggtttcaaaggcctaactgaggcacctcnctgctacnncngatcctgtntgnactcatacttcaagcgnccggcatgcatgnnaaacgtnaagccagagaggagacttcactcttgagatngngacggacacttccacagaaagaagactggctgncacaggaggccgnnacactagcatggccccctgactgggcatatangacctccaggccatgctngactcacgacctggaaaagcnnaactgntancaaagtggaaaacagntgaagctcattncaaaatccagacagatcttgtnatcntaagnaagantnatgnnnntcaggagagtcctatgactactgaactgnnnagaggaanagncacagncngnagagangactcagagggctaaaaacacttgctactctcagaggact

SEQ ID NO: 1026 - DNA, 132 bp, Homo sapiens
  misc_feature (1)...(132): n = A,T,C or G
ttattatgctcagtgnangctgacttgggatgagactcanggncatcattntgctangtgancacatctgcgtcagnctacancccctgtacctctctcatttactaaaaaagtcaccgatgaaaaaaaaaa

SEQ ID NO: 1027 - DNA, 190 bp, Homo sapiens
  misc_feature (1)...(190): n = A,T,C or G
gatttagggggggacncgngnccaacaagccacccagaggagccgcaaattttgcggggggcnagaaaacccccgnncccncncgcagaagccccgggggacnggggcgaggacaccgncgnaggcgcggngaggnaggggagaaacagggngcgcnccggnagggggaaacagcagacagaacggacgg

SEQ ID NO: 1028 - DNA, 215 bp, Homo sapiens
  misc_feature (1)...(215): n = A,T,C or G
catgaaaccaagcagntttgacacaccacaccaacgtgtnccttgatgaaggacagcaagcccatgacaaactacattcacatggatccatgccgccaacctgcaacntactgatgcatccagcctatccagggccaatgtggaatgtgaacataaaggggaccaaggagaaggaaaagcaacctgatnttgggggctgcccggggggggggggg

SEQ ID NO: 1029 - DNA, 181 bp, Homo sapiens
  misc_feature (1)...(181): n = A,T,C or G
gagggagaaggaaaacccggaggcaaaagagccacggacaagagagnaaagaanagggcannngnggcgggcnngacacaacaaaacgaccngaaaagcagggccccggaccggggacgaaagaggagccacngngagaccaaacagaaggccnngggctacttcgaccgcgggacaggac

SEQ ID NO: 1030 - DNA, 105 bp, Homo sapiens
  misc_feature (1)...(105): n = A,T,C or G
gttagtccaacatgctgntggggccgcaacgtcaacctcacctctggtgaggngcagncnnatatnggnaacnaccggcntccttaagaccatatggcaagggta

SEQ ID NO: 1031 - DNA, 116 bp, Homo sapiens
  misc_feature (1)...(116): n = A,T,C or G
ggggctgtttccacctgctgccnnaatntgcactgaccttcnaaanggctctcctntgcgaagcaggggcnnntactcttctggttagacaggggatgaaagactctatcacgtca

SEQ ID NO: 1032 - DNA, 134 bp, Homo sapiens
  misc_feature (1)...(134): n = A,T,C or G
tgcagaagccctcagaagtcgagaattntgtgntganggaaanccnggaggacccaagcgctgngtgntgagnnttnggttngancnatgggcaaatgctggccccactcctactgaggcttcattatctccag

SEQ ID NO: 1033 - DNA, 112 bp, Homo sapiens
  misc_feature (1)...(112): n = A,T,C or G
ccgcagagccgctgttttcatgcaccnacncacccccagggggagtttaatgaagtattcaatttttncaggggctgggaaaancccngaggcagctgaagaagggagaggg

SEQ ID NO: 1034 - DNA, 338 bp, Homo sapiens
  misc_feature (1)...(338): n = A,T,C or G
acccctttgtgcccgaggtggttttgaccaacagcctgtnnctcataaagaggagatgagttaagaggtggaggggaaggggactgaagggtcttctgaagttcccagatctggctttggcattctcagagcacagtaggaggaccttggtcattctcacacggttgatgccctcgagtctggcacttttctctactccagtaatggcgatagagagttagtgtnaaagccaggagaatggcccctggcatcctggatagcacagaggagacccatccttgtggacagtcacaggatggcagaaaaaagatatattgtgtggagtggaaaaaaaaaaa

SEQ ID NO: 1035 - DNA, 493 bp, Homo sapiens
  misc_feature (1)...(493): n = A,T,C or G
ctgtctaggattcttatcttgagtnaccgaaaggggattaacacagtggatagagaaaccggataaatgtgtggagagagtcccagcaggcaaagagctttgnctctgtgcatggctttcagtaccccaactcccaacctttacaaccaaaagcaaggaagctgtcctatggataagaaataagcagtaagaaaaatgttgccgtcacagaatgccatccacagagcagaggagacaccatcttcatcaaatcaactgtgtacacctgcaagcaacctcaggggtggcctgcacactgctgacattcccccagggaaagaggggacagaaaggaccatggggcctgagcttctcggccatatgcatacaggtctgccctcactgtgantggcctctggtctctgtagaaggctggggagntaactgaatgggctccatctatgcagccttggnaaagcggccagncacaccatgtgaagactgtccaaagcaa

SEQ ID NO: 1036 - DNA, 361 bp, Homo sapiens
  misc_feature (1)...(361): n = A,T,C or G
cttgagtggggtctcatattggattcagttgctctcagttcttcacatctgaatgaggctgatgaaggtgaggcgggctttatgtgctagctaattgggtgctaccaggaacaaaccccaaacttgtagtgtcagcaactgcgtattgcataatcagctgcttggaatgcccacttggggattggactgcgataagcaagtgccatcccannnntgcnagacaagcatcgngtcaattacactgtggatggtcggatttatgtgctttttggcagtggcgctaaactattaatcatgtctcatgaacagtctccgtgtaaccgcaacattccaaggacgcatccnacggacccgttctggc

SEQ ID NO: 1037 - DNA, 196 bp, Homo sapiens
  misc_feature (1)...(196): n = A,T,C or G
ggggattttgtggtaaattncaaagggaaaatggcacttacggaatatacctgcgtgtccangccacctgtgtccaaccccacacccccccggaaccnggactnccggaccttcatcactatcggagacagaaacttccaagtggaggnttgaagacantcacagcgaactcatatacntaaaataaatgatttct

SEQ ID NO: 1038 - DNA, 393 bp, Homo sapiens
  misc_feature (1)...(393): n = A,T,C or G
acctcggcctactcatgtgatgaaggaacancacgcagcctnggcanccctgcnttgngccacntacctgcagtcagnttgtcccccaccaccatcancagcangtcactctggcnatcatttgactggccctctatgggagatannacttatgacctcancttccccctggttggatggcaagagtatcttgctacaaccaaccttttcatggatacatggtcatatcatctgcgggctggtgaggtggacacctgccatcaagtctgtcaagctgagttctatccctcanaccaaggtaaaagaagagaaccaactcttgcacgttgtcctatgacctccacacacagcaattgcacaaacaaatatgatcaaatattttttaaaacaaag

SEQ ID NO: 1039 - DNA, 256 bp, Homo sapiens
  misc_feature (1)...(256): n = A,T,C or G
gtttggcgggatgcactganattccacncagcgccttgncgagtaggnccnggtnntgccanctattgttgnntgnnaagaacaacacngggngacagtnagatggcctnagcaggcacaagcggtatgttcntgcangaggacccgagtttgatctgtagancccacagtcgaaagaagagccaattcaagattgncctctgaccgtaactaaatgtgacgtgcnatacaggggngaagacagttcacagatcat

SEQ ID NO: 1040 - DNA, 221 bp, Homo sapiens
  misc_feature (1)...(221): n = A,T,C or G
gggaaacgggcccgatttagggggaaaaccaggggcgagcggcagaganagcgnanacacnantgacggggggaggaaannccgaacnanggggganacgaangangganggcccgcaccaaccagncacaacgcangcagagggaggacncaggnacggcagggnacagagggaggcnaaagagnccgggagagccaccgnccaggaaagagagcagcac

SEQ ID NO: 1041 - DNA, 155 bp, Homo sapiens
  misc_feature (1)...(155): n = A,T,C or G
tatgtctggtgcccgnactgcgcctgctctcttcttcctcggctgtcnttnagnttgccgnggggngacagctcggcctnccagnagcaccagcagaggcttgagtactactgtaggcatgcatgttgtacnnagcnataacatacgcgtcctgt

SEQ ID NO: 1042 - DNA, 130 bp, Homo sapiens
  misc_feature (1)...(130): n = A,T,C or G
atgcctagctcgacctggnaggccaccgtccngcacatacacaggagctgcncacccanccagagangaagccngaggaccatgggagaccaaggnattgacctnctagaagantgcaggagcgaacaga

SEQ ID NO: 1043 - DNA, 337 bp, Homo sapiens
  misc_feature (1)...(337): n = A,T,C or G
gaaaccccgcccaagccacccngcacgccgncggccatttaccggccncnagnaaccnccgncnacaanagancacgccaggagacgagcaggaagcnaagaaagcggcccagagaaccgaggaagggggccacacccacggaagcccnaaacaccaagcggaaccaagacctcccccggagacgaagacccgccagaanngacgngggggnngcgcggagaacnggagacngancgccnggacggggaagggacaccccggagcgggaananagagaaacaccggaanacccncagccgncacccgcncgcgaagangagccaacgcacggagaac

SEQ ID NO: 1044 - DNA, 190 bp, Homo sapiens
  misc_feature (1)...(190): n = A,T,C or G
ggtctttcaccttaaagaggaatgaggaaatacgtgcattattataccaacaagccttacacccaaagcagccatgtggaggcccatacgctggtgaccctgttccaggggctgggaccatatcattccaaccctatcaaagctatgctggactnagcagcatttcaagccagctttattggaacggtaa

SEQ ID NO: 1045 - DNA, 173 bp, Homo sapiens
gagctcctcggcagttttgagatggttttcttccctggatgaagagttgtgctgtcagacacaactagcaagttatcagtcatcctgacgcaccacaacgaaacacacccaaaactccgctgtcaggcctttactgatttctaacgcccatcacaaaccccagccaactgaag

SEQ ID NO: 1046 - DNA, 106 bp, Homo sapiens
  misc_feature (1)...(106): n = A,T,C or G
actctctctaacactcnagtggaagactgcctgatggngntctctgctctgnagnngtgggcgactggagcagcntgctgcttggatagcagcgtccattcactaa

SEQ ID NO: 1047 - DNA, 125 bp, Homo sapiens
  misc_feature (1)...(125): n = A,T,C or G
acaatcttgctgttgatngaaacattcgangcttggttgangaagcaccagggaggcaggnngtacagccngcgagggagggcacagatgcnaggnacctgcgcactccgcccttctctcttaca

SEQ ID NO: 1048 - DNA, 113 bp, Homo sapiens
  misc_feature (1)...(113): n = A,T,C or G
gacgtgaaagagagggcggnccggnaggagtccggngcgnnagagagcacactnccgngaatcncgnggaggaaacacccgtcagagtgcnagcagagaccaggggcacccga

SEQ ID NO: 1049 - DNA, 168 bp, Homo sapiens
  misc_feature (1)...(168): n = A,T,C or G
gcaagaaagtacagtcnggatctaggagaaagtctgactcctcacacaggaaccatgtgcaggctgaggacccatgtccttcatcctgtttggccattgattgacanagcagntgctaatgctgccaggtttttattgntctgtgtcttaaagcaactttaaatgttt

SEQ ID NO: 1050 - DNA, 106 bp, Homo sapiens
  misc_feature (1)...(106): n = A,T,C or G
gccttattgtcttccgagggtgtgncgaagctcccctttctccaaattnatttttttcttttatgaatcttgcacatatatagcngaattcctaatcaaaaaaaaa

SEQ ID NO: 1051 - DNA, 255 bp, Homo sapiens
  misc_feature (1)...(255): n = A,T,C or G
cctgtgtccgccagcttttagcagccccgttttcaaggttcattcacggcgcaggggagtnggggctncgtgtgtctggagatagaactgggtagccaacaagatggctagctcaacagcagaggcccaggttgccctgctcaacggctggtatttgccacactatcttttaaaaaatacccttcaatagagacctggatttcccctcccatgccatgcaaattcaatagctgnaaagcttaagtttgcaaagtt

SEQ ID NO: 1052 - DNA, 204 bp, Homo sapiens
  misc_feature (1)...(204): n = A,T,C or G
aaccaggacagcagaaagaggangggganactctgtgtagcccnggctgcncggaaacacgcacacgaanaccaggctggccntgccgctgcctnccnaggccccngaggacgngcagcngagacngactacnnagatgcaggancagggggcgagcangcngactaacaccagaacccgccaggatgcagagacacaggacat

SEQ ID NO: 1053 - DNA, 212 bp, Homo sapiens
  misc_feature (1)...(212): n = A,T,C or G
ttttttgaagtaaatgacgtnaaagaattngagtgatntggagcgnnagctgtgnactcatttgatggntgacacacttcttcctgagagngacacactganatgtgtngngacnaaaacacaggncctagggttggaacttngatnactnntgagtcaacaaatgnccnatgacacccctgntcanctttacagctcaagctcttccatgg

SEQ ID NO: 1054 - DNA, 150 bp, Homo sapiens
  misc_feature (1)...(150): n = A,T,C or G
attttggggtaactgtgtcgggtccancaggggcctctcaccaccagcagcaatcctgaggcccaactgatctcttccagtgtatccggatgtggctgacccttntgcacgaaggcattctgggaggcagggncactcctggggacatca

SEQ ID NO: 1055 - DNA, 176 bp, Homo sapiens
  misc_feature (1)...(176): n = A,T,C or G
ggcgctgaccaggctnttgancgcccagcagccagcaccggtggaangaggngccgttgntgaactctcanctacntntncagcactcatntntgantgcncgtnacnagtgcatttctgtcatnacaataatgaacttaagcctcaattaaatgttntccttcataaaaaaaaaa

SEQ ID NO: 1056 - DNA, 356 bp, Homo sapiens
  misc_feature (1)...(356): n = A,T,C or G
cagactgaggaacaggcatacacctgctaccaggacttacactctggccatcagctcctctccttgtctgctgccacgtgacgcatgcacagagccgcaacagaaaggancgacaggngcngngacttgtnaccaggnaagccaactgantctgcntgtacngnnagcggncctgcccacagncttcatccatcacnttcnnacacanggatgacttgntgcctanatactttcttnaacacccaaaatcactggangcatncatgtntacacgtgcctgnntggctntgttnannaantncatnnnnctgaggccttggagtttattaaacgtgaatgaacccataaaaaaaaaa

SEQ ID NO: 1057 - DNA, 106 bp, Homo sapiens
  misc_feature (1)...(106): n = A,T,C or G
cacaagcggagaagaggttctgcngggtacaacgnggcccttgccatgagcagagaggctgctgagcaggaagaacgcctcaggcggggngatgacctcagagggc

SEQ ID NO: 1058 - DNA, 148 bp, Homo sapiens
  misc_feature (1)...(148): n = A,T,C or G
agactgaggctcctcttgtatgaaaaggaaacatgncttgctgnnngaactgatgngagcgctgttcctgnnaccatgcctgtggcacaccttgatggcctctgacccccgtggaacngnaagcctaattaaacctttttttttataa

SEQ ID NO: 1059 - DNA, 145 bp, Homo sapiens
  misc_feature (1)...(145): n = A,T,C or G
gatctgagatgcaatgtgatcggtcancttcctgttcttgccactgtgacctccccttctccatcatggtggactctaggccccctacccccaacccnctggaaatgtaagtccaaataaaccttttctcccctaaaaaaaaaaa

SEQ ID NO: 1060 - DNA, 244 bp, Homo sapiens
aacggaaagccagagcctgctggcctaaggaataaagcaaattagagaagctacctgccaccttctcagagacatcagtgctactggtttcctgaaacagtaacttcatggttagctgctgccatttggtgtgggaaaagatcactttggcatgaaatgtatgtaaatattttggtaagcaaacaactttcatcatgactatgatcaataaatcgctgtgtgggaatctcgggaaaaaaaaaaa

SEQ ID NO: 1061 - DNA, 123 bp, Homo sapiens
  misc_feature (1)...(123): n = A,T,C or G
aacaagagcttttgactttganggaactgcttgctcctcctcgcacccctaccncagncacaaagcctagcagattctngcncatcacagactntcaataaaaagntatcaaataaaagaaaa

SEQ ID NO: 1062 - DNA, 282 bp, Homo sapiens
  misc_feature (1)...(282): n = A,T,C or G
gactgaggcactgctaccatcagaagctgatgacagccagnctctgaacccaggnatggtgtcatccctaggcaacaaggaccctcctgcatctgttgccatggaaaccactgcacactccctgtgcatgccttacctgcatcacctgcgtgcgncattacctgggttacacatatcacggcctggatgaaagacagagaccccgacccatctgcctctttttgtcttcctcgcttcttctccctttttaataaaggacctctctcgtgggaaaaaaaaaaa

SEQ ID NO: 1063 - DNA, 207 bp, Homo sapiens
  misc_feature (1)...(207): n = A,T,C or G
agacctgtggacctgaagggggacatgagaaggacagganacccagagncctnctaacctgacnaggagcagcanggnccancgccctgaaacnccagccatnnctccantntttaaatataggggctagtgtnacagctcagcaggcaaaggcactcgccaccaagcctgangacctgaannagatccctgagacccacacaggga

SEQ ID NO: 1064 - DNA, 153 bp, Homo sapiens
  misc_feature (1)...(153): n = A,T,C or G
gactgaggtttttattcaactatctagaaaagncacccaggacttgccaagagctatcaaaacatcatttgtgagcaacagtaagaaaagacttggaaaaatttgaaagcagtttttcctaataaaatgatcgtcttagttacaaaaaaaaaa

SEQ ID NO: 1065 - DNA, 120 bp, Homo sapiens
  misc_feature (1)...(120): n = A,T,C or G
ggtttgactcttaagattgaacagcgaactcagaatccactgagccaagttttggacgccngccacncacactgnctgaaggctaagcctgaanacaaatctngctctggcatactggct

SEQ ID NO: 1066 - DNA, 182 bp, Homo sapiens
  misc_feature (1)...(182): n = A,T,C or G
aagacacgtagtattttaagaggaannacaatgaagccttcaagacgtttaaaataatatttttttggagcagcaggnancaagaaaggagatgagaatatatcagaagactcacagttgcactttgcaatttaaagcacatcttcaattttttaaagggactttgtattttaaaaaaaaaa

SEQ ID NO: 1067 - DNA, 167 bp, Homo sapiens
  misc_feature (1)...(167): n = A,T,C or G
agctcttctgtcggaaactggtgtctttccccttgctgttcttcaacccctctgnccaccctatctatgcttctctntgcggnaccaccactcctaaacctagtcctgatttatcagagntgtnngtttgtttgtttttgttttttaacaaaacgtaagaatgaaaa

SEQ ID NO: 1068 - DNA, 269 bp, Homo sapiens
aggtgggctcatccaagagggaaagttccagatcccacttgcgcctcccaggagcaatggcggagtcattcctgcagctgtggtttgtagaattatgctgtggcctgcggcctgaaaatcccaatacagatttgaccatgaaggtgggttctgctgagtgacccaaagaaagactgctttggactcaatctgggatgccctgcggttctcttttgagacctctctctctttggtttataaacacactcgccaaggtctaaaaaaaaaaa

SEQ ID NO: 1069 - DNA, 139 bp, Homo sapiens
  misc_feature (1)...(139): n = A,T,C or G
tttcagtgcatgggtgtnctcggtgngtaatggncctaggaatccttcaactacagctaacctgaccctatncatttacttgatgtcaactaagagcattcaactcatgcccaacttnanatcctgatgggagaacata

SEQ ID NO: 1070 - DNA, 239 bp, Homo sapiens
  misc_feature (1)...(239): n = A,T,C or G
tccctcctgggatggcggcccatgtttactaaagtctgaaatttcatttaagcatgtgcccaagccaatcgctgcaggggggagaatttcctgctggaagccctgggggatgcttgaaaaaananccnctgnttggncttgnattttttcangttntccttnccaanaacannggggaaacccaacccccctaaaaaaannggggtttttgggaaaanaaatttcgggccccctttcct

SEQ ID NO: 1071 - DNA, 560 bp, Homo sapiens
  misc_feature (1)...(560): n = A,T,C or G
actgaggtggggtctttcaagcgcaagctgctcttcacgacacagagactgctttctaacaagccaccagcccaccagtcagggagaactaccatggagtcgattccttccaggtggaacccatgatctgaacaccacctctaaaaagccaccacactggagcgggcagatccgtgaacacnggtgagtgggtgcccaactgcagcctgacaggggcacaaagaacgcccatcccataggtaaactggaacaggacgccgaggaatgaggagtgcacaccaggcccttagaaatccaggaagctggaggtcaaatgtaacttcccccaccccacaaagggcaaccacacaaacgctcctcaacagatggatgagcaaacaaaataattactaacttgattaaaatctagaaacacctggaagatcaaacaatgaaatatacctgattggtttaccttaattgccattaatggaggtggcaagacctgcccaccatgggtggctccattccctagntnttccttctctgcttccttggngaggctgtaataagccagcccc

SEQ ID NO: 1072 - DNA, 287 bp, Homo sapiens
  misc_feature (1)...(287): n = A,T,C or G
agagagacacttcagggacgcctgctcttctctggcttgaattaatggaagaatggagtttatacntgtaggttttgtctgtctgtcccaggacagtctcagcatcagtttctaaccgtggttnctcctcccaacctncaaacgtgngnggtgcatgatgaacacagaccccgttaccttcgctgncatgtanatnagattgtnaaacaccatggcngtcggnctgngnnganccccanncttntcctctnnntcnncgcctccatgntnntaataatctctaggcc

SEQ ID NO: 1073 - DNA, 409 bp, Homo sapiens
  misc_feature (1)...(409): n = A,T,C or G
tacctgtgtgcaaccagtgctaccagtttctcagcatcccacgctgctctcctgctcacccttctgagccgcccaaccagtgagtctcagggtctgtgacttccctcgcctggattgccacattgaactcttcaaacacatattttaattttaatttaatttattattaacactgagtctgtatatgtannaaaaaaagtgaangnganntggagccagngggnacacncangtgncnnancctgnnnatggagggaggagagctagncctctggattcaggcctcatnnttccatcangntcanatgatcggcnnnggagcagcgctttgatctgatgacgcancttgctggtnattgatatgcatttttaaacaaagccangaaaganatgggagcacaaaaaaaaa

SEQ ID NO: 1074 - DNA, 244 bp, Homo sapiens
  misc_feature (1)...(244): n = A,T,C or G
tgagaacagatttttgcgctgntatcancngnaggcntgaacttgggttgcntgangacctattcnatccnnggaccatttttccctaaggaggnangacattnttatactgcncacactctaatttttagaaagcccttnagntatnnaattttagagattataaaatataagaattttataatgagggggcgtggcntcangangtaanagngtgttctgcncttccagataaccatgagtt

SEQ ID NO: 1075 - DNA, 107 bp, Homo sapiens
cacccatcgttatatgcggccttgacacagacccaaagcaacaagcccaccaagccatggaccaaaatctccaaactgtgagccaaaataaacctttccatttgtaa

SEQ ID NO: 1076 - DNA, 190 bp, Homo sapiens
  misc_feature (1)...(190): n = A,T,C or G
acccccctgcaggtcccagnatatnagaaactaaganntgaagacaatgacnannnaggcgatgaannatgacggtgatgacgacacaaccccagagctacttntgnaaaggatctganttcactgtganccgctctatggcgggtggntctaaannacctgngactgtgaccccacgggggtctggcac

SEQ ID NO: 1077 - DNA, 264 bp, Homo sapiens
  misc_feature (1)...(264): n = A,T,C or G
tttttaggggaaacacggccggactccactgaaatgaacngctgncgtntttgtgaggggcngnagacccngatggagctgatgccgctgacctgngcacngaactgccggnttccagacaacaaagaagggagatgttccaaagatcctttctaaacaggtccacgttcccccatatccattacntgcttggcggagaatgggctaaaaggnnttttaaagnngggaagaaccatcatnaaaagnagggtttttttttttttc

SEQ ID NO: 1078 - DNA, 292 bp, Homo sapiens
  misc_feature (1)...(292): n = A,T,C or G
actgaggtgcctatgaaggtcagtaggctttgaatccctgggagctggagttcaaggaggctnctgccggctggttacgagtgancagacaccgcccacacccacagactgtaccttcatatnctcgccatccagaaggnctatgatgccatcatgctcatcggacaacagnggngttttacagggttnnttantgnagcggntacngnnnnggncctcancatgngcacnatgctgcccttggccacctgcctgtctnccaagtgctgggattaaagatgtgcaaccccca

SEQ ID NO: 1079 - DNA, 175 bp, Homo sapiens
  misc_feature (1)...(175): n = A,T,C or G
accactctgcataggtatcatcgttccnagcacaaactggactttcctacttgcctgacaggagtcacacagatctctgtttgctaaatgagcatccgaggtaagagccacgtgcttcagnnacttggtngntttcctaancaattaaatntcttaaatatgtgtgatagaaaac

SEQ ID NO: 1080 - DNA, 185 bp, Homo sapiens
  misc_feature (1)...(185): n = A,T,C or G
gcactacccacagagnaccatcaagantaagaggctctctngggctgactgntgactgtggttgaagacctcaacantgatagacncctgcctcctccntgcggncgcttatgcgcggatncaggatncctgccatggaantacatgccacaagcggacggcancangnccgagcgccacacatt

SEQ ID NO: 1081 - DNA, 140 bp, Homo sapiens
  misc_feature (1)...(140): n = A,T,C or G
ggtcggtaggctcagcagcacatagaaacgtgttggaagcaactggagtcagtaagtgggtagccggaagccgncagctaagccagnctctttcccagaccagctcatttctatctgaatctggcttgaatggctcgcta

SEQ ID NO: 1082 - DNA, 115 bp, Homo sapiens
  misc_feature (1)...(115): n = A,T,C or G
cccctcctcccatttgggttcntggaccttcggtgccaangaagagcaangagcttttgcaganaaaaccggatggagnttttgatgtggaagaaaaaaaggttccggaaaccca

SEQ ID NO: 1083 - DNA, 116 bp, Homo sapiens
  misc_feature (1)...(116): n = A,T,C or G
cccgcaggcatgttttcaatatgccagtgnntggatgatgggctngatngaaancggcccangcgtggaangngaatctgccgtgcncagaagcatattcccaacctgatgagcag

SEQ ID NO: 1084 - DNA, 229 bp, Homo sapiens
  misc_feature (1)...(229): n = A,T,C or G
cccgacttctggccccctcctcccaccatgccnagnnagctggncatnctgnncctgattaacgagancaaagagcagntgatggctgaaaagatcctggncacctgacctgccanccacctaagactcatngcnncagccnctgntantccctaccgngcccgncgagagcagccaggcggtnntgtagntgaccaagctgcagcaggtgcccgggctgaacccgcag

SEQ ID NO: 1085 - DNA, 161 bp, Homo sapiens
  misc_feature (1)...(161): n = A,T,C or G
caagtctgaaggaggatcttcaaacnttaaatgacagcaggcaagactatacttgcgtcctgaggtcctcttgaggcacattcatcattcatttttataaatgangacattcaagccttccttaccttnttcagaatttaataaatactggggtgcctttt

SEQ ID NO: 1086 - DNA, 116 bp, Homo sapiens
  misc_feature (1)...(116): n = A,T,C or G
gggggggaagaccacatctctctaactctccanccttatcntgaggacncangggatccattcgggttacngggctnnataaacatngatttaagcnncctgcttgaccatatgac

SEQ ID NO: 1087 - DNA, 167 bp, Homo sapiens
  misc_feature (1)...(167): n = A,T,C or G
cgcctcagcagataaagcaattgttgttnttncagaggaccagaggatcagttnctcatcccaagttgggcntgctcgtangtgtcggnaactncagcttcaggggcttgaatntatactgaccatgggcacntgtgccncaacacaaacacatacacatatacata

SEQ ID NO: 1088 - DNA, 349 bp, Homo sapiens
  misc_feature (1)...(349): n = A,T,C or G
ttttgagacaactggagttcttacntnntggccgacattgacaagtaagnggggaccttggttccatctcagatnctttgttgttatgtagttaataggacagatngtagattatgaaaatggatggngcttgtgtcctttggnacccactatactatnggaagttgngtanacgtgtctacttgnaaaatacattctataatccttcaaatacgagtaacaccaccccctggcaatgggcactagagacaccttgttaatggtgntgntcttatatcanccaggggcanagtnnanggnantcctttgntcatcctatcttgatgcctgncttggtggccaaagctgt

SEQ ID NO: 1089 - DNA, 106 bp, Homo sapiens
  misc_feature (1)...(106): n = A,T,C or G
ctgtagaccccgatgtgngnagccacctgggagagcatctgccgtgactgtgcaggagtgttangcacacccgctttgatcagatcgacntacacagatgtgccat

SEQ ID NO: 1090 - DNA, 175 bp, Homo sapiens
agattgagtaatagggcccagtgctccataaaggataacagtttccagtacaccatccctcatgaggactccctgagtggctcgtcatccgcctcctcttgtgaaccagtcagtgacttcacagcaaccctccgaaaatctacctactggatgaataaaatgacgtctctcagaa

SEQ ID NO: 1091 - DNA, 103 bp, Homo sapiens
  misc_feature (1)...(103): n = A,T,C or G
gaacatgaaactgaatanacttganatngtttacgttctggcnnggcgaagantacngcggttttncagctnactgggcatggcacctttctaagagtgactc

SEQ ID NO: 1092 - DNA, 140 bp, Homo sapiens
  misc_feature (1)...(140): n = A,T,C or G
acgagttttttaaggggccaacanctggccagtgngcngcnttcaangcgctaagttcatgcccacctgggggnggggaaggggggaacngcncaccagaggcacattggtgcangggngacagctagcgcacccggcca

SEQ ID NO: 1093 - DNA, 128 bp, Homo sapiens
  misc_feature (1)...(128): n = A,T,C or G
cgatgctagagcaaganggaattggctngttacgcantaccngatcatgaacatgttgaggatgaaactttntntccntttccaccttcggcctagncagananngatcntgctgaccctgaacctgg

SEQ ID NO: 1094 - DNA, 103 bp, Homo sapiens
  misc_feature (1)...(103): n = A,T,C or G
ctggtcctttggaccnnaaccccncggcggcagactagacaggaaaaggaannattccgtacgcaccgngaccnattcaccctccacttcccgcctcagaccc

SEQ ID NO: 1095 - DNA, 155 bp, Homo sapiens
  misc_feature (1)...(155): n = A,T,C or G
ggacacgtggcacagnagagcntacatcagcaccatnggggtggatttcaagattttanccatctgagctggacggnanacccatcaaactgnngatccnnggacacantntgntcaggagcgggtnnaggaccatcacttccagaatacctatc

SEQ ID NO: 1096 - DNA, 385 bp, Homo sapiens
  misc_feature (1)...(385): n = A,T,C or G
tgagtggtggctttgcgcttccttgagnccaacacccaacagcagcagcattgggaaatgcaatcaagccttctctgcatttggtgttcacctctccagcagccctgcccagaggtaacacggaaggaccagtgaatactctggacactaatctgctgagcaactctcccatggagaaggatcagaagcaaggaaagaaactggatggaagcagcaagccctcttccaagggtcaacctatgtcactacatctagaaagcactccttgctgcaagtgattcctcctaggtgatgtccaaaaagctcaagaaatttaaaagtaacaagatttaaaatgatgttactaagtatactaaattccatttgtctgtcaaaacaaaacaaa

SEQ ID NO: 1097 - DNA, 426 bp, Homo sapiens
  misc_feature (1)...(426): n = A,T,C or G
actttgaggaaaggcctgggcttcaggcacggcgagaagncttggactaaccatccccagttnagctnggngncttctgaggtcagcgctgtcaagtntctgnnagtcgactcttcccctcatcgtccataagcaaagcagncacggcctccagagcaccgtttgtgggagctccttgacagcgtcttcgtttctattaccaccttcctccgctagaacccttcttatgcttcctgtctgcactgnctcgagatctctgcacgacccagcagaggggccctgcccagtgcgcttccatttntccacctcagacctcatcatgcagcccttccgctctctganaacgccatttgcctgtggntttgntaagaaagccatgagcttggccgngactgtggacatttcntttctgcgtgaaccacagtg

SEQ ID NO: 1098 - DNA, 150 bp, Homo sapiens
  misc_feature (1)...(150): n = A,T,C or G
gactgagcaccttgagtcggcttcagncaatcaagcaaagaagatgtaaaccatggcccttgaagaatcaaagaagaaaggcaaatatgtgcattacttctacccttactctttactctgaataaatagctttctgcttaaaaaaaaaaa

SEQ ID NO: 1099 - DNA, 190 bp, Homo sapiens
  misc_feature (1)...(190): n = A,T,C or G
cttatatccacttcactgcagaaggggaggtcaccttcaagtcgattttgcttggacccacatcncgcacctngaggncctgnnnngatgaatatgggtggtaagcaagagngattatattaagcccgcgatgtncgncgngttttcatcacagangacttccatgaaatgacgcccaaatgccttaatt

SEQ ID NO: 1100 - DNA, 487 bp, Homo sapiens
  misc_feature (1)...(487): n = A,T,C or G
ggcactgccagttgtcgaaccacccactcaaccctaagcttttgggaagacttntcttttccaaggcataaaccatcttacatgtctctaaaaaagaagtcantattaaggcttgaatctagggactgcagccctctcagcaagcactggacaactgagctgtngctctcctcttgtgtttggaaacaggacctcggtaggttcctcagtggcctggatctctctntgtagcaccaagcgtacacaggcaaggctgggaagaaggctcagctgttgtgaatcttctcaagntaggatgctaagattcccagtagacggacctggtgcagtggctgngctctgttgcatcttctataaggnggcatgtgacggcatnatctgggcggactaaagctcataatgtgttgntggtctactcccaagngcatgtcatatcaaaaaggcccnnataaacactgagcactgattcttcagaaaaaaaacacaa

SEQ ID NO: 1101 - DNA, 333 bp, Homo sapiens
  misc_feature (1)...(333): n = A,T,C or G
ttgagagagctgctgngaagaattagctgcggattngaagagntngtnagctaggcngccttcantctcgcctacagannctggtctcttcctttttcctggccctcgccagactctcactnangtgacangngnntgtccaacatgaccggacttgccgntcctatcatagangcttgttttatanaggaaagcaaacacgacagccctcagngagtnctaacactgctgctccctntagcagagggganaatgaagncanatggagcccctttcangacaacacctntgacncanactatnagcgacagaaangccaataaagcctgctgc

SEQ ID NO: 1102 - DNA, 506 bp, Homo sapiens
  misc_feature (1)...(506): n = A,T,C or G
tgagattgatccaaatcctgatnagtcatccgaggncagaccatcatgcccctctcgctgaagcaacacttgactgagtcaagttgacatgggttctgaactgtatctcttccagctgaggacagagaagtatcttggagacacgtttgcagaggaagtggaattgcctttgcccagacagatggcaaacacatgaaacaaccagtgatcatgctttagaatcctacagcatcatttggggctgttccaacatgcttgaagatctgagctttcctcctttaaaactggcacatgttaagggcagtcttcttagcctgtggtcatccgtgtcaagacaccattgcaaagaaggatgttgtccttcctatttgaaaatttgcacatgctcaatgcttacattgtgcagttcagtgtcactacagcattttttttccatttatgccagactcttgatactcttacaacttgtttatggtcagcacaacatggaacaaaagaaagctttg

SEQ ID NO: 1103 - DNA, 161 bp, Homo sapiens
  misc_feature (1)...(161): n = A,T,C or G
ctgtgggactgtccaaacggcactcacagctaagnctgacatttacaatagnnactttcctaantattaacanctgagaagcttcccaaggncttnttnttnatttactgtnntttatatgcacgttagcaattaaaaaatatttatttttaaaaaaaaaa

SEQ ID NO: 1104 - DNA, 116 bp, Homo sapiens
  misc_feature (1)...(116): n = A,T,C or G
atattaagcagaatttaacacagtcttgggaaggcctttgnctgaacacattcngatctcaagcccagtaacagctntctatctacntgctgcataccccaccattccattcctgg

SEQ ID NO: 1105 - DNA, 109 bp, Homo sapiens
gttgagcagcaccaagcaccttgagagaagctggctgacaccaacatttggacatcccagccctcagagccttgagccaatacattcctgttctttgcaaaaaaaaaaa

SEQ ID NO: 1106 - DNA, 213 bp, Homo sapiens
gactgaggttggcaggaagtgaaactcaattgtctgttcagtagactggccctggacccagccctgggccccggatgtataaccccacccagaggaagaagaggctgggaaaacaggcttgttttttcctttccctttgttcactgtggtttctttctttctgacttgtatgatgtggttgattaaagagatgagcacctggaaaaaaaaaaa

SEQ ID NO: 1107 - DNA, 126 bp, Homo sapiens
  misc_feature (1)...(126): n = A,T,C or G
cctacagtattcagaatggncatagacaggcgtccacgctgttcctcttggctgcttcaaggcacagaccctgcccaggaaanacagggtcaancgngcggaacgagngagtgaaggaaagaccat

SEQ ID NO: 1108 - DNA, 175 bp, Homo sapiens
  misc_feature (1)...(175): n = A,T,C or G
gacctggagcggtcgagccaagtagacctttctcttncttangtcngcntgttgcacatgntattttntnncagcnacaagaagnaagactatgggcacctggcatatnaccggttcctatttcaggtcaaggactaacaggaaaatnntctcaacagatgaacccaaaaaaaaa

SEQ ID NO: 1109 - DNA, 254 bp, Homo sapiens
  misc_feature (1)...(254): n = A,T,C or G
gggggcatgagagcgagaagtacatctgtatgaacaagaggggcaagctgattgggaaggtgaggcctggacacaagcagcanacagatgtgtcttccctacgggagtaagggcaggccaggccacagcaatgcatcctacgcctgctgctgacctaactcaccccgttaaagctgaggcctccagcctgacaggacgaggtctcattttgacaaccatcccatcccccaacctatttaattttttttaaattt

SEQ ID NO: 1110 - DNA, 252 bp, Homo sapiens
  misc_feature (1)...(252): n = A,T,C or G
tgagccccatttatctacttccaaaagntgcagctattacagcctacaggaaacacaggactttgcagagacaagcttaccaaggacaatgtgtgtgctgtgtgctgttcagagtcttccaatagagaaaggaaagtggggcacagacgagagactttaagagcagaaactctgctgccttttgcataaggaggggaattaagacagagggagagccatttatctgcacaaaataaaatgcaagaaaaccag

SEQ ID NO: 1111 - DNA, 428 bp, Homo sapiens
  misc_feature (1)...(428): n = A,T,C or G
agaaagaaccaacagcgccaccggntanggagcagcgagnccccagggcccncagaangaaaggaaggncangnggcaggaancnccaccggacagcaagaaccccacaggggccgggccaacgcggcggacaacagaacccccccancagagcccacgcaggcacncccngcnccncnncctgtgccagcacgccgagccccagaacnggaagncgggcnaacagnccccaccncaagacggccncgggagcaggganggccccacanagcaacanggccgngagncccagccagcggccngcccggagccccaggagacaggaacccgccaaggggaagccnaanccccaggccacccnnggccggagccanggcagnaccacanacnacaaagcccaaacagcaagaaaacgggagacccccgcc

SEQ ID NO: 1112 - DNA, 129 bp, Homo sapiens
  misc_feature (1)...(129): n = A,T,C or G
gaagtgatggctggtgtgccatagcaaccggcnggagaanagaggcagcccaatgaggagntgntgangggnctaatgcctggaggctgactgnatagatggtntggggagaggaaagaccacatcaca

SEQ ID NO: 1113 - DNA, 480 bp, Homo sapiens
  misc_feature (1)...(480): n = A,T,C or G
tccgtctcaagttcacaatgctgtttcaacctcncaagncctggaatngnncngtgancacaggcagntattctaagttacntagtanaagacttagagtantaccagtaggaccatccccatttttgcatgccactgnttcatgttaatgcnncncacctgcngnnactgagcagccctgacaanccctttatnctctgggtagccaacaactttgtcatacacagtagtgatcaacaccattantacaanagatgggctnccatgatcatccatnaaanaccctctaantggcanagccatagctggagtttaaaactatntnaaaanttccacacangaanctgggcacagngncatacccctgtgacacangcactgggtacatggaggcaggangatgcnantntcaaagtcnttactnagccacacaaagattttgaggttagtantggctggatgagacactgcctcaaaaac

SEQ ID NO: 1114 - DNA, 214 bp, Homo sapiens
  misc_feature (1)...(214): n = A,T,C or G
acactctccaaaaggcagcgtcctttctgtgtgtttatctgggaatgaagaaggagcnggctatggaccgccctcgctctggaaatggaaaagtacattgtggaccttggaggcgacaacgcaaattaagacagacattctttgtgttttgttttgctttttaattaggtttatttattttatnttatgnatatgagtgtttcacccgtccccc

SEQ ID NO: 1115 - DNA, 208 bp, Homo sapiens
  misc_feature (1)...(208): n = A,T,C or G
aatgctcgatggggagaacagtgtcagtcaggacgatggcactactgagatagctcatcaggggctagactgtgacgaggaagaggaggcctgcggcagtcaantccaangaatgaattntgngcncattgagncaagtnttnaaagtnccagaangaagaanatggtnngcgaaccagcgacagtcttcattcctaacagagaatga

SEQ ID NO: 1116 - DNA, 228 bp, Homo sapiens
  misc_feature (1)...(228): n = A,T,C or G
cgagcctggtcaacccatggagcttgtagagngcncctgatgccttagtaaanaggntaagacgccngnntgngtgacaggctggggaagatgnccatnccacagntaatnananctgcctcaggaaaaatactaacgttgttctatctgnncctggccttcagtttgtgagattactctatttttttaaaagatantnttatttctttcaacgaattaaaaaataaa

SEQ ID NO: 1117 - DNA, 328 bp, Homo sapiens
  misc_feature (1)...(328): n = A,T,C or G
cagcactcagaccgtggagcgtgctatgtgggagctgggaagctgattccaggctactcangcacnnacgcgtgggacgcttgaggancntaacacanntcatgcnnnctacgtggagaacctgannatancctgnangaagacgtgccctctgcntttcntantgggnnntggcgcaccatcnnatncctcnntcntnntanactgtagnccttgaagatgttcctgngttggctttcccacttcatggtatcctgggggaaaacacacccataagctgtatttttgtagccctcaactctgttaaagtaattttccactttaaaaa

SEQ ID NO: 1118 - DNA, 108 bp, Homo sapiens
  misc_feature (1)...(108): n = A,T,C or G
cccctggtaactgggagatacanctgaangctgctgtgngggtgctgncaatcaaactngngncctctggaacggcggcacctctnctttttgatgattaaaagcatt

SEQ ID NO: 1119 - DNA, 471 bp, Homo sapiens
  misc_feature (1)...(471): n = A,T,C or G
atctgaggttgagatcctctgttncataggggtcancagtacaggagctatggctgtgccactgccaccantgccactgcctgtcccaggcccaccagctccatcatcttctgtgggccctggagcttngccaccttctacagcagctcggacttgggcaaccttgcgacggacctnggtcttgaggncggaccacttcttcttgacttcgggcagctccctacggcaggtggccacagggntgacccttctcaggatgccatgccaggctgcactcttggcagccagagggaccccagcattgaagtggttcaccagcaggtgcttcttcagttccagttcctccacgatgatctccacttcccgctctgaaaagttcatcttcctcttcttggctgggacagccatggcctcccctttcctctctttttaaagaaatnataatgctcttaacagccccaaaaaaaaaaa

SEQ ID NO: 1120 - DNA, 136 bp, Homo sapiens
  misc_feature (1)...(136): n = A,T,C or G
gtaccttaagtataataataagnttttggacctgnaacangctngggntgantggantgagcagaggncctaaattcaattcccaacaacctacctgaaggctcactaccacntatncgngctacagcgtacctca

SEQ ID NO: 1121 - DNA, 198 bp, Homo sapiens
  misc_feature (1)...(198): n = A,T,C or G
atgactcacctccatcnatgcaagatcgntanaagactggttggtggtttngcnacanagncattctgtaccaacagtaatgtcttggacccttctcctggnaaaggcacatttgaaccttccccatggttctccacatntgttctccacccattctccctccagcggtggagatgatgatgatggtggtggtggaga

SEQ ID NO: 1122 - DNA, 158 bp, Homo sapiens
  misc_feature (1)...(158): n = A,T,C or G
tttcgcgggaccacagnaaaccgaaggaaccagaggagccacacacagggcaccgcgccaccnggagcagagcagnanncggcagggaacnggggncccaccnancngcaccacaagcnagggngcggaccaaaaaaanccgagcccccgaccagaca

SEQ ID NO: 1123 - DNA, 319 bp, Homo sapiens
  misc_feature (1)...(319): n = A,T,C or G
caaactgtcaagctggcttttaactctnactgcagcgcangtgggccttgaacttgtgatccacctggctctgcctctgaagnngctgggattggagcagatgcttttgacatggcatttccagtatcatctattgaacagtctcgcataccccagtgacatgagtcanttgtgtctccttctatcatttgtgcaattcctatgtatgatgcctgttccttcagtgtcaagcctcctatagtacatgccaatactagtattactcctctgcatttattcagtanactttctcctatcttattttattaaaaaaataaaa

SEQ ID NO: 1124 - DNA, 206 bp, Homo sapiens
  misc_feature (1)...(206): n = A,T,C or G
aaaggcaaattttccggaaccttnccccngattttaagggggaaancacgccccnaagaagcaaagaagangcagagnntttttngaggggaaggaaaaacccgngcaaacaaaagaagcagcactttgnaaggagggagcnagagaacagcccgcnanagacccaagcnctgaggcgccngaanccacacgaacagcaatccatc

SEQ ID NO: 1125 - DNA, 116 bp, Homo sapiens
  misc_feature (1)...(116): n = A,T,C or G
aaaatttacggatgaaacnatttccaaanttctagaagtnatggaaggtanttttcctnttgngggcaagngcgagaaaatgcctatgaagaaagtntaactgtgggcgtacaagc

SEQ ID NO: 1126 - DNA, 121 bp, Homo sapiens
  misc_feature (1)...(121): n = A,T,C or G
ctttggctctgagagcacgcggctgaccncaanngtgtgctgctgagcgtntcgatcatgcaganacncatgcccnttnncgtggcatttanaggntacggcctgaagcaatgcggcatga

SEQ ID NO: 1127 - DNA, 159 bp, Homo sapiens
  misc_feature (1)...(159): n = A,T,C or G
tcttccgaaggtacacgagntcaaatcccagcanncacgtggnggngtcacaaccatnnttaacgagatctgacccccttttctggagngtcgtgaagacagctacaatgtactttacactatnataaatanataaataacatctttaaagaaaaaaaa

SEQ ID NO: 1128 - DNA, 219 bp, Homo sapiens
  misc_feature (1)...(219): n = A,T,C or G
cagttgtaccgatttactccactgtttgctacaagattcagcagctgttccgtgtgggggcccctgttnctgctgntnccaggcacccgctggcaggacaaagcacctttccccaggtaccgntcctccaatctgcccttacacaaatgtaccacaaaattctcttcancctggnagtgnggcaggaagaagagctactggatgcatggctacattagg

SEQ ID NO: 1129 - DNA, 106 bp, Homo sapiens
  misc_feature (1)...(106): n = A,T,C or G
aggactgggctttagccagnggatctccaccttcctaaggcttcagacccttaatacagtacactcatgttctggngaccccctcccccaaccataaaattattct

SEQ ID NO: 1130 - DNA, 139 bp, Homo sapiens
  misc_feature (1)...(139): n = A,T,C or G
agaagcatatttcccanatntctggngcanatgangatgatagaanggcttctaggacatttaatgattgncggcaagaaatgtgccagnagatatgngngctgaagcgcnggntaccnggcatggtggtgaatgaagg

SEQ ID NO: 1131 - DNA, 144 bp, Homo sapiens
  misc_feature (1)...(144): n = A,T,C or G
gggttgaaccaccacaacactntgtggtgataccnangaagnatntanagccatatttcnggnctanatgatgatgatgaanggctnctaggacattnaatgattgctggcaatgaaaggggatgaagatgtgggcctgaagcg

SEQ ID NO: 1132 - DNA, 217 bp, Homo sapiens
  misc_feature (1)...(217): n = A,T,C or G
aaccaagaaatttatctctactanccactgatactattagttgaacagagtgctgtaattagaccttaggaatcacatcgctgtgccagttggaagctgttctgcccactgaatatcaagctaagttaaactttgcatttttttaaatgtttattgttttgtgtgtatatgaatgtgtatgtgtcatggtaatgtattgaggtcaaaagagaaaaaa

SEQ ID NO: 1133 - DNA, 153 bp, Homo sapiens
  misc_feature (1)...(153): n = A,T,C or G
ggttaacctccagtgtggccaactaaatcaaacagaaggaggcttgtttgttcntttacatacntggtttacggctggcttactcaggctgnctgcaggatgccngnngcacttgtacaaaacagtgnggtcatnncgtgaggtgtgggccag

SEQ ID NO: 1134 - DNA, 370 bp, Homo sapiens
  misc_feature (1)...(370): n = A,T,C or G
atggttggttgtatggccngagccactcccaggactgtgtgcacagcctggcgtgcagggagagcgctcgctttggacatcttcagggaacaggtccatggaaaagcacacagcaggctccgcagcaactgcgtctgctctgctcagatcggtgtctgcacacacagtccatgcttgctatcccattgagggttcgagcagagcagtacccctgagctgttgtcacccctaaacctcttatcgagagttcgagcagagcagtacccctgagctgttgtcaccctctaaaccacttgttttttcattgatccatctggccagtttttaaattttttatttcaataaaacatttggaagttaaaaaaaaaaa

SEQ ID NO: 1135 - DNA, 216 bp, Homo sapiens
  misc_feature (1)...(216): n = A,T,C or G
acactgggcagtttttatcaggaanaccgaagaaccagcgggggagctctaacaaagttgtgaaacttacgggtgggtacaacaacaacagcaacaacaaaaaagtcctgaaactctaaatcttaaaatagaagcacctgcattgcactacattgtaaaaatcctctttcagattttgttatattaaatatatttcctgctttcgaaaaaaaaaaa

SEQ ID NO: 1136 - DNA, 210 bp, Homo sapiens
  misc_feature (1)...(210): n = A,T,C or G
ccgcttgccctgccttattgcttcacgttattcnggaatacgttagcangcagncancaagatggcctgcgcaggccancactgaagcctgatngcctgagtccagtctgcagaacccatgtggagggaggagagcactcactcgtgcaggtttcctctcacctctacatatgngcncacacaatacagatggacaccagaaaaaaaaaa

SEQ ID NO: 1137 - DNA, 304 bp, Homo sapiens
  misc_feature (1)...(304): n = A,T,C or G
gaggagcttgctcagggccttggtgtgtcatcaaacctactaaggagaccgggctggcttcaaacttgcagcgatcccctcgccatctaccaggtgctgaggtaagtatgcagtatcatactctttcccattttagagtctagaaaaggaaagcaagtgcctgaggctgagggttgacatgtgacgacgacaacctcagagacagagcgttctgtgggctcagctagaagaacgtgccatcacccatgccgacagcagacacactgatgatataaactctagngatataaaaatctattaaaag

SEQ ID NO: 1138 - DNA, 120 bp, Homo sapiens
  misc_feature (1)...(120): n = A,T,C or G
agacagcaccatgctgtccctgttggaacgttggggaggagacatgagacnagtagcnanctcacccacccaanaggcgtcaccatgggnagnccactttttttcggggcaaggcccaaa

SEQ ID NO: 1139 - DNA, 202 bp, Homo sapiens
  misc_feature (1)...(202): n = A,T,C or G
ctgaggttccagctccccntgggggtgnctttggcggcagncgcggntctntngacagaggcnntcgaggaggtggaagaggaggccgaggaggctttggcggtggacgaggaggctttggcggtggaggtcgaggtcgaggcggagggggnngtggcttcaggggacgaggaggtggcggtggccgagcctctctcttacc

SEQ ID NO: 1140 - DNA, 423 bp, Homo sapiens
  misc_feature (1)...(423): n = A,T,C or G
tgagaagctccattgtccgcaggtcaatttcttcgaagaaggagaaaccgaagatgatctcgagagctcttacagtgacatcactatcagggccagatccagcgattctcttgagtcaagagntcangacttnccanntcatgagaancacttccttnctgctgacctcaggatgnnagganaaccctcaggagtgggttgaccgagctgtacnaangaggagtnnaatggngtannacnccantcccatnntcaactctgnatacctggcnccatgaacctcnaggccacaatngagctnttcntnacnnnnttgagccttnnggnaagnnaangtgnaggctgaatgaatacantgtngccatccgttgcgggagggnctatcgctggttctttcataccctctgcaggggaaaccactgc

SEQ ID NO: 1141 - DNA, 241 bp, Homo sapiens
  misc_feature (1)...(241): n = A,T,C or G
ttaccacatcatggactgctgcagtctcactctnctgnnctggcacgcatcattncatgctacaaggctacacnanattatgaaggaacctggcgatattnctgantctananatagnccattagggggtcctaanccatatncttnttcnagaggactagagnngtgntctcagcacccatgttcaggcacgatgacaacgtgtctataataccagctanccaggatctgatgataccca

SEQ ID NO: 1142 - DNA, 247 bp, Homo sapiens
  misc_feature (1)...(247): n = A,T,C or G
cacccaggctacagctccangcccaggtactcaacgatgccacagaccggtagtncacctacagcctgcctctcccagggaccaggcatggtaggaggttgatatgggagcacgtacnccgagaccactgnggaangattcnanaagaggattnnacatntgccgatgncgggaggcaccanacnncccccantttgnnantggngagacgnnnnttgtgatntcagatgtgctcccaggtggaccc

SEQ ID NO: 1143 - DNA, 164 bp, Homo sapiens
  misc_feature (1)...(164): n = A,T,C or G
ttccagtttatctctgnacactnaaatgctactanccagccatgtgaagattacnntttccagncagacactgtntgangattctttccaacagattatgaanatgaaaccttacgacctgcgccangcggctctacatcatnatgcntggtgaggagggcctg

SEQ ID NO: 1144 - DNA, 416 bp, Homo sapiens
  misc_feature (1)...(416): n = A,T,C or G
acctgggctacagccaagcactcagctctctaatctntgaagcaccgagactntacaagagacaccctctgggtcacaggataagtctgctccgtctggtcataaacatctgacagtagaagagttatttggaacctncttgccaaaggaacaaccaacagntatgggtctagagtcagaggacacagacaagctgttgggagatncatcacanaaagagcccagctcattcctcccatttcccttngagcagtcagggggagcccctcantctgaaaacctgggtatccattctgccgctcaccacacagttcagcctgaantcagcaccccagtgctgatcnctccngccttnattgcanagtcgggtgacaaacatccccnaagntacanactcccactgagccctgtcctca

SEQ ID NO: 1145 - DNA, 430 bp, Homo sapiens
  misc_feature (1)...(430): n = A,T,C or G
tgtgttttgagggttaacccaagaccatctnaaaagccctgaatangggttatttaaggagggaagaaanccgcgcaccctgatctggagcncatgactaaggcngcctgnttncaaaactnacncgcaggcttnacgttcagagtaacaaagncngacagcgtttttgtcggtcagatcttcatcaggagtctnaagacaattttnagtagagtagcccttcgtgttgatctgtggagatncttgnaagtgnttttgttngntggggntaggnntnngntnnttatgnggtggngcccatactacggnagctgttntcnanctcnccccaggttttnnttaanagtcacaaagtccagnaccttttttcggncgactctnatcggagtctcaacacaattncnccacgtcgccctctgttgctctgtgg

SEQ ID NO: 1146 - DNA, 145 bp, Homo sapiens
  misc_feature (1)...(145): n = A,T,C or G
gactgagcaaactgtacaatctaaagtggactgcattttggtaggtncantacctcacantctgacattcttanataantatctgnntctaantgtctcttgagtttntgngantaaattttacatttacaaccagccaaagaaa

SEQ ID NO: 1147 - DNA, 133 bp, Homo sapiens
  misc_feature (1)...(133): n = A,T,C or G
acaatctaatttggcactgcatnctggtaggtgcaatacctcacantctgncattnttaaataaatattgattctaantatctnttgagtttntgngantaaattattacatttacagccaaaatgatcaaaa

SEQ ID NO: 1148 - DNA, 501 bp, Homo sapiens
  misc_feature (1)...(501): n = A,T,C or G
attgaggtacccgatgccctgagtngtgctaaatgacattcaggagtggatacagaactgacctttgagaaacttacaaactctgtggacattcacacaagaacagagaagcttcaaaaataatcagtcctaatggaacttcctggagactgatcacctggttctctaccaaacaacgaggccaatgcaccatcttcccaagagtcctgtcttcttttcactcaaaagcatctcccagcagccctggaaacgtcgtggagcctgtctctaatctcatcaattccatgtcaagaggtgtcatgtacggatgttctactgtacatgtttctgagctttgcctgtgtgctcacagaggctagaagatggtatcagtactcttaacttctgagactatttccagccccccagatccattttataaagcactcagatctgcctggaagaaactattatatactcagaaatatactgatggttatttatagttctacaaaaaaaaaa

SEQ ID NO: 1149 - DNA, 152 bp, Homo sapiens
  misc_feature (1)...(152): n = A,T,C or G
aaattttggggggaacncgggcncnaacaaatagacaggaangaggcggtttcgcggggcnnnananccaggnngaagaagagaagacngagaacgacaagnaccgggcggcgcgngccgatggaagagcntaaagccgccgagaaagactt

SEQ ID NO: 1150 - DNA, 155 bp, Homo sapiens
  misc_feature (1)...(155): n = A,T,C or G
taactcatttttatatgtacattttaatttcgattcagctggtctggatctntgaatttatatcattcaagacttccatatgggcaggagttgatactctaaccctcccctccttaccacgggtnagacctaaagaangtgaacattattttttc

SEQ ID NO: 1151 - DNA, 508 bp, Homo sapiens
  misc_feature (1)...(508): n = A,T,C or G
aactgagataaaattcacaagaaaccctgaattggcaaaggagaaagtgaaggttgaaccatcagattctctgccaacatgccaattcaagacagaatccggtgggcagacatttgcagagccggcagataattctcagggacagcccatggtgagtgtcaatcaggaagctcaccctctgccccagtccccaccatctaaccagtgtgctaatataatggctggtgctgcccaaacacagtttcatctaggcgctcaagagaacctggtgcatcagataccaccaccgacgttgcctggtacctcccctgacacactcttgccagacccagcatcaatcctcaggaaagggaaagtgttacatttcgatggaattacagttgttacgganaagcgtgaagctcaaacatcaagcaatggaccactgggtcccaccacagacagtgcacagtcagaatttaaagagagcatcatggacttacttagcaagcctgcaaaaaacctgact

SEQ ID NO: 1152 - DNA, 170 bp, Homo sapiens
  misc_feature (1)...(170): n = A,T,C or G
gccatggtactcactgntgctgngctcaaacaagcaacaatgattcatatgcnntcaatnnttcacaccntgnngaancaatcgaatgatgatngcatgccatccttnttggccagcataacactgnttcatggtgattcttgatcgncttggatctaaggactgggggc

SEQ ID NO: 1153 - DNA, 415 bp, Homo sapiens
  misc_feature (1)...(415): n = A,T,C or G
caccctaaatattcacgtgtgcatcctctttggagtcagccacaccttgtctaccagtccctggcaaccgccaatgatgaattgaattctacaatcctatactgcctctggtaagaccctcgctgccactcaggaactgtagctctgtactaggcatggtactgtggatcgctgcctcctgacgaccttgcgaagcatcggcttccatcttccttttacagagcagatgggcggagcttgaagaggggagtgataagcaaactgaggctcanaggagaaaaaagntcannatcaatttgtgacatctgccgatctgggnggnnaactcccaggctgttttnagccaccgattggagaatagcnatgagttgagtgtgtgntggctcntgcgcacacagggcaaacacagcccaca

SEQ ID NO: 1154 - DNA, 247 bp, Homo sapiens
  misc_feature (1)...(247): n = A,T,C or G
tgaggaacgtcatcaaactcatgacagactgacatctcctcagatgagcctcaggcaaacagttgttccagaaggaggcacagtcctcagaggagacagcaattgatccagggcgtcaccccaggacttcctagtgcagcaagaggtggaggaggacaattgtgaccctgaccatccagaccacngatcaggacaaggataaagttgtgagtgtgtgttcaacaacacacccacaaaaaaaaatgaa

SEQ ID NO: 1155 - DNA, 121 bp, Homo sapiens
  misc_feature (1)...(121): n = A,T,C or G
gactgagaggtagctcctctagngtnaaaagccctggggctatctgttgcagttgaagagaaatttaccagtggaatccccctccccctcctgcaaaaataaaagtttgaaaaacaaaaaa

SEQ ID NO: 1156 - DNA, 491 bp, Homo sapiens
  misc_feature (1)...(491): n = A,T,C or G
aaccagaaggtgaagttttgtnattntacccacacaaataaaaatcaaaaggagctggtttacnactagagagaaaagtggagctgagtgtccagcctgcatgggagcctgggatagaaaaggagactgacaattcttcctgtatggactgctgtatgggacattctcgttttcatggggagcagagcaacccttctgtgaatgtgaattattgccatgctntnagctttatcaaagactgccgtgcttcagactcatggacactgacagccttccttgggtcaggctcagggattgacaaagcctcaatgtgatccatttgcagatactgacagtgtgcaaaaaccagcactgacagcttcctcctcccagatgactgcacctgagaccactcccctccagattcccccatattgagactagctaatgcttccttcctgtgttgcacataataaacttgctgtgattcctgttgttctctatggagttgg

SEQ ID NO: 1157 - DNA, 128 bp, Homo sapiens
  misc_feature (1)...(128): n = A,T,C or G
cggccagggacgagaccagcnccacaacagcnaaaacaacangncnggcnnccacancacacaaagcaacggacagacgaacnnccaaaaagancaagaaggacaaagggcaccgggggaaggcagaa

SEQ ID NO: 1158 - DNA, 151 bp, Homo sapiens
  misc_feature (1)...(151): n = A,T,C or G
cggctgggtagcctgagnncgcacccacatcgtggaagaggagaagcagcgcttgcacgtcgccctctggcctgcgcactggggcggccgcggtggatgtgcttcccttcccccaacaagtataataaactcctctttccaaaaaaaaaaa

SEQ ID NO: 1159 - DNA, 125 bp, Homo sapiens
  misc_feature (1)...(125): n = A,T,C or G
tccccggtgaccggcatccangactgttgnacaantgcgccttccatgatggagtaagacttaagccttctctgctgctgttgataaaccaagagctgggttgcttattcttccacattcaaaaa

SEQ ID NO: 1160 - DNA, 200 bp, Homo sapiens
  misc_feature (1)...(200): n = A,T,C or G
gtctcgggctggtgagaanggctcagtgggnacgagcacncgnctgntnttccgaaggtacggaagttnagntcccagccaaccacatggctggcgtnanaaccntccgtnncgagatctgacgccctgttntggagngnctgangacagnntacagtgtacttacatataataaataggataaatctttaaaaaaaaaa

SEQ ID NO: 1161 - DNA, 179 bp, Homo sapiens
  misc_feature (1)...(179): n = A,T,C or G
gactgagcaccctcccccgcaagncctgggatttttgagagtgagccactggaacctagcatcactccacagatactctggtttgtgtgtcagcaggggacacagntgtgctcagacacaatcaaagcagggaactaaaacccagaatangccctttctcccctgaattgctttcatca

SEQ ID NO: 1162 - DNA, 127 bp, Homo sapiens
  misc_feature (1)...(127): n = A,T,C or G
gcccttttcgggcttgacccccccccacctgctccnccccgacccccccnttggncccgccccccccgccgccccccnccnnnncnacgagaccgggtggngcnggngggcccccccggggcacgca

SEQ ID NO: 1163 - DNA, 343 bp, Homo sapiens
  misc_feature (1)...(343): n = A,T,C or G
acaataactctagcaggagcggagaggncaaagacgctccaagagtaactgctctgtgcttggcacagagagcagcctgctggaatggagcaatgatgccatgtgtgatgacactcgcctgtggtaccagcactggagaggctgaagaggcaggaagactgaacgttttaagatcagacggagctacctgaacatacagtcgggccctgtgttagaaaagcaaaacaacaaatgaaatacagcggagtgatgagaattgcatcagacccttaaagaccatccgtttctgttctggcttttgaaactgacaatatatgtataactctggcccagaaaaaaaaaa

SEQ ID NO: 1164 - DNA, 122 bp, Homo sapiens
  misc_feature (1)...(122): n = A,T,C or G
cgggcaccttttttttncnatctgacagganaagagactcctctntcctcccatgaagagcttangcatgccttctnttnnggnangcttctagaaggagcngcccttagggaagcaaacct

SEQ ID NO: 1165 - DNA, 220 bp, Homo sapiens
  misc_feature (1)...(220): n = A,T,C or G
gactgaggagctgggcagatgcccnagggatgcctnngtgcactcgagngnatgtntgccaccctgcagcttccagacccagctnggncancgacatgatatngatntnnnaacactngtgtgctatncntcncacagccgggntctgggagggagagcaagaacctgttctcgtcccgtggcgttatgntgcaaactcgttactaaatcacctgcccca

SEQ ID NO: 1166 - DNA, 336 bp, Homo sapiens
  misc_feature (1)...(336): n = A,T,C or G
actgagggagtagccgcagaagctgccagnctcgcagnaagaatcctggncaggatgcggtgactcaggatgcgacacagccagacagctgcctgggaaatgatgctacagaacacagaccatctttgatgcttttcaaagttactgatattttgattttctaactgtcactgttgagaacatcaaatcaatatgtggttcaaaatagttaaagcatatgtaggaacatttcagaactttgtggaaattctgtctaatcctaagccataattcactgaattaattttatatgactttcaagtgagtaattcaaacagcaattttaaaaataaaaaa

SEQ ID NO: 1167 - DNA, 217 bp, Homo sapiens
  misc_feature (1)...(217): n = A,T,C or G
ctgacatgagaccttccntttcctgcatcacccntgaagatgtgggcancgatgcagganaggggngctnatgncgaggatangctntgtnntcaccatacctgtnatgtgtcataagaccntcagangnanatacacnnttgttggatccggccctgaggttccctaaagaagaacaaaccagcacactgnttatttaaagcctgaaaaaaaaaaa

SEQ ID NO: 1168 - DNA, 138 bp, Homo sapiens
cagaccttcagctgaggagctgggagaacctgtatgcaaccacctgggctccctctgccctttggaggggtaactgtgaggagagagtcttgcgtggcttccaggttttgtgatgagattaaactgtagttgcccaca

SEQ ID NO: 1169 - DNA, 191 bp, Homo sapiens
  misc_feature (1)...(191): n = A,T,C or G
atagaggagcccgagaggcctgncaggaggtgctgaatnacaagccggtcagcacagggcagatcngtggtgaggggnccactccanttgnncccgcatnngntccatngttanccctgcgaccnatngtgagccccagcacatggcntgcnccttattctattcnatatattnacattcataaatataat

SEQ ID NO: 1170 - DNA, 231 bp, Homo sapiens
aagaagagaagagaagagtaagagaagagaagagaagagaagagaaagctggagaggtggctcggtggtttatagtgaactgttcttatagatgacccaagctcagttcccagcatccacacaggcatcatcaccatcagatccaggagaccctacacctccggtctctgtgggtaagtgtggcccaagtgtgcaaacccacatacagacacataattaaaaagaataaaa

SEQ ID NO: 1171 - DNA, 183 bp, Homo sapiens
  misc_feature (1)...(183): n = A,T,C or G
attagcccagctgcctgcagcagactatgaagccagacgcnaccanatctnatacgggggcgtcagccatcacagtntgaagngggcacttataaattatnaacacacncctgacccaaatgcatttatgntcaggncgaacatcatacacataaaagaataaaatagaaaatgtttgagtta

SEQ ID NO: 1172 - DNA, 215 bp, Homo sapiens
  misc_feature (1)...(215): n = A,T,C or G
caacagtttactactatgcaccgtaaagagcaaaacaagccaggggctggtgcccatntttaatccnagaattctgaaagtagaggtnggagatctntctgagttcgaggccagcctgagttctggggcagccaagattcagcagagagcaaagacaaagaaagaccttgncgagaaagagagagangagaggaggaaagaaagaagaaaaagaa

SEQ ID NO: 1173 - DNA, 538 bp, Homo sapiens
  misc_feature (1)...(538): n = A,T,C or G
tgagggtagccatcccccaggtctgggaggtaggactgaggccagcagagacacaacactggntgagtnaggccnaacnctctggcaaggacagcncatgctgtnagaacccggnngccntctaggnaanggcnggcttggagaacacagctctggntcaatgcagataanagaangatctctcacgcaggccagnccacaccgagnctcagcatcgggctccaggnctgagggtntatttcctcatttatcatatgagcatntntgtangaagnngncttnccctcacaggctgnggatnctcatgtgccaaggtgganncnancgngggactngngccnatctagacttacantttatcaantgtggggctagagcagctctagacttacatttcaactctatcgctcctgagctgtgtgaatgtaataacactncatatngaaccctcanntgtagaaaaggggacagcaggnctatcctggtctaaccctcagctgtagaaaagggaacagcangcctatcctggtctaaccct

SEQ ID NO: 1174 - DNA, 113 bp, Homo sapiens
  misc_feature (1)...(113): n = A,T,C or G
gcactggcaagaggagcanatgtcccatganatccctggagacctgactcttaagnanctgaggcagtacagcgngcacganngttaagcatgtnaagaagccacccttcaca

SEQ ID NO: 1175 - DNA, 187 bp, Homo sapiens
  misc_feature (1)...(187): n = A,T,C or G
tcggtcaacccaggaccgcctgcgaacacantancnggaagattttnagcngnntttctagcccntgggcanggcacaggangcgatgctgnngtncgacaaaaccaccaacaggcacanagggttctggngtntgtcanctttgagcaatgaagactgtngtggagaaagtctgtagagattcatt

SEQ ID NO: 1176 - DNA, 332 bp, Homo sapiens
  misc_feature (1)...(332): n = A,T,C or G
tgagggacccatccaccaggctgcggaagctggcaggctgcaaaccccattggcagggaaagggtcggtcactgaggaggcccctcctgcagtggctaaggaaggacccgcgtgaaggtcaaaggaagggtggagagaagaggcctggacagcgaccagagctatttggcagagggagtntgtggnngaaacccaagatatcatgcggtgcannacaaatgctttaccaccaagccgcaccccttgccctgccccgtntctntatgtgcacctcncttngcactgagctgagancccttagganactgctgntgcaagctgatgctgctact

SEQ ID NO: 1177 - DNA, 354 bp, Homo sapiens
  misc_feature (1)...(354): n = A,T,C or G
atgctatcctgactgcaaagagagtnttggacagtnnaatgaaanggcacnacatggganagagaacctgcacccccagatgggcnctgggccacacnggcacctaccgagtccgagacnaagtcctcnggnttgcangacctttataccccanacaccgnnacctgagccnganctgccaactgccatagcctgccnttgtcttctngctgtttgcctcaggctcgcgncncagggcgaggcatntttctntnctagctgcagctaacgtgcgnaggnctggtttgaacttgccaatctattacgccgggacaggtgggactgagcactngaaacnagctaatcacggaggga

SEQ ID NO: 1178 - DNA, 261 bp, Homo sapiens
  misc_feature (1)...(261): n = A,T,C or G
ctatgacccaagcgcttgggannacacganctggatgtaatcnntnngctgctgttccanngcttaacgctgncttnntgctgccaccgccttcccaccacaatgancaagaaccaaccctntgnagctaccagcatgcccccgaaccaaaggcctttctttttataagcgaccttggtcatggtttctttctcttcaaagcaacaaaacagtaactaatacacatactttttggttctatagatgcctcaaaaaaaaaaa

SEQ ID NO: 1179 - DNA, 250 bp, Homo sapiens
  misc_feature (1)...(250): n = A,T,C or G
gctgctgggctagaatgaagtaagtgctgatgtgtctgctgcagccatgtccaaagagactgccaacttgactcaggtgtttatcngtgtcctgaagtaggagtcataccgaccatgtaccagcaggccttcgccggcagaaccctgttctaggttcttggaagaaatggaaacgtccttttagactttgagcaggatcagcctccatggtttcataataaaagaacctttgaagctttaaaaaaaaaaa

SEQ ID NO: 1180 - DNA, 217 bp, Homo sapiens
  misc_feature (1)...(217): n = A,T,C or G
gcaccaccaggagatcgccaagcggacccagccacctttgaaacgggcccgaganccccagccacaagctgcccaacaaccacnacntgcacctcgnganggccgccgggaagnngcgcccncccncaaacatcatgnccncacaaaaggcccnggngacaggcaaggccgncgagagcccngcnanggcagccanngagaagaaggcagggacacc

SEQ ID NO: 1181 - DNA, 161 bp, Homo sapiens
  misc_feature (1)...(161): n = A,T,C or G
gtttttcgggaaggccgaaacccaggngcgccnanctcaancatcangtccncacaaaaggcccnggagacangcaaggcccgccgagagncctgcannggcagccacctganaagaaggnagggacacctgcnnctcccangaaggagggagggagccgg

SEQ ID NO: 1182 - DNA, 165 bp, Homo sapiens
  misc_feature (1)...(165): n = A,T,C or G
gttttgagctaccgcaggtgctggctnatctacagacacaagcgctaccctcgtgagaccctctgtaccttgctctgttcccctncatccaggcccggggctccctgcccaacttntgcacctcgtccatggcacggatctccagacncagcttgtccatgactg

SEQ ID NO: 1183 - DNA, 120 bp, Homo sapiens
  misc_feature (1)...(120): n = A,T,C or G
ggcgactttcaagagtcangnctcttcttccagcatgtgnctcccanggatgganctnaggccngcaggctggggtggctagtgtggattactaaaataaacatgataggcctgcgaacc

SEQ ID NO: 1184 - DNA, 113 bp, Homo sapiens
  misc_feature (1)...(113): n = A,T,C or G
gggctgcgtgctgcctgccacacncctcaccactttgctgncagtccagcctgcngcctgnntctcngcgcacngncaacccctggaatgncgtcaattagaatgtcagagcc

SEQ ID NO: 1185 - DNA, 267 bp, Homo sapiens
  misc_feature (1)...(267): n = A,T,C or G
caacaagcgacagtgcntcctcgtccccatccctgcatgngngcttctttgcctaataagggcacattgcaggcttntctgatnatntctgcctnanacagagcatgccccagcacaccnggcctatgtgtgctaaggaccacaccagggtctgctgcggacttgacgtgttccctatcaactgaactacacaccaactttcacttctctcttttagtgtacttatttccagatattcaataaaataatttcctcaaaacaaaaaaa

SEQ ID NO: 1186 - DNA, 523 bp, Homo sapiens
  misc_feature (1)...(523): n = A,T,C or G
accatagcagcaaatactctggtttgtncagaagatggctctgatgcatacatnanctctaaaaaacccaaaaggaaccgtgtggccctccccaggtgtgacactggctgtgcagaggctttgtttggactcaagaacattgcctccccatcccaggacttactttcattattgaagcacaagatcacancaaaggaagaatggcagaaactcattcaggttctcaccgaattccacgtgcaaaatatcgatctgctacatagtaaccttgaggtcatcctgccactgccagttcatgtggttccagatgtaaggggtgcttatggcttcccagtgactacacaggccagtgcaccagcaagcatggggcatcttaccaggaagcantcaaaagaccagccattgagaaagtcacagaaaaggaaacagaaaaagatggtgatcctagatgacagtgacctgtttgacactggcctagacttttctgntgaactgcctaccctatctcctgcaccctccttgt

SEQ ID NO: 1187 - DNA, 177 bp, Homo sapiens
  misc_feature (1)...(177): n = A,T,C or G
ccttacctgggaaaaaccangggccctggggactganacttttnttanagcccaagccatgggaaaagttccccatttttttacattaanagcanaggcttnttnnttaaaanggaaatgatntntactaaatcgaaaaaaactcngccctaaangnctggcccaaatttcctgggg

SEQ ID NO: 1188 - DNA, 449 bp, Homo sapiens
  misc_feature (1)...(449): n = A,T,C or G
acctctccagaagtgagaaccaaagggctggtgactngtggcacagaactgctcccgagatctgctctgatctcagatggatgcacctggagaacagcacctttcagagctccttccttcccacttccgctttccttccgccagtaaaggaagaccgctgagccaaagtattcagacagaagaagcttgcctacnttttgtcaaagnnngngaccaaggctttcctgaagctaatgtatagaagattaagaagtattcctttcatgcttccccaagtcctaaagaacagatgactggccaacactgcctcctagtgnctcagctcgatgctgcccagaagggtggatgtgagggctgtttgggncctaangctnataatagttgggttanaatgtnctcactgtacaaacctatggatcacaaagccctaatcattaaataacgtgcca

SEQ ID NO: 1189 - DNA, 139 bp, Homo sapiens
tgaggacggatggaatcttctcacatcatttttgagattaaaccccgactagtgcttggatatagtgatgtataatgcttatgcttttccagtcattatataaatttcccaataaaatagagaatcaccaaaaaaaaaa

SEQ ID NO: 1190 - DNA, 148 bp, Homo sapiens
  misc_feature (1)...(148): n = A,T,C or G
tgctcctgaaaggggntgatgannaaggccctgaaaattttgaccancaaacaacaccangtgtgganagannacgtanngtgcttcngacctccaganttgtcctctgacacccacaacactattgtggcatgtgggactgtccccg

SEQ ID NO: 1191 - DNA, 281 bp, Homo sapiens
  misc_feature (1)...(281): n = A,T,C or G
caaagtatttaaatgacctcttcgagaaatatgtgcccactctcatcgacatgatcatagaggggatcgtggacgggaggcaaggggagaagctgaagatggtggntccccagacagacctaaatatggtgncccatgnnaccactgatggtngatncgctgctacnancnaaaaaggttgcttncctgcnnctnanngncccatgagntcggggtnntttttnccangcnntgacngccactctgcangagaaacnggaangaaaaggccatgatgcact

SEQ ID NO: 1192 - DNA, 130 bp, Homo sapiens
  misc_feature (1)...(130): n = A,T,C or G
atacctgtgaccctgccctaggttancttgntnnatatggcnnnagggccacatgactgcctgancctgcttggacctcngtntggaggagagggtgacctaattngnaacaaatatatagcaatgacac

SEQ ID NO: 1193 - DNA, 166 bp, Homo sapiens
caccttgaagatgcagcaggagctactgctgcccgcctcacagaccacctccacgcggcttgttcccgtgagacaaaccaacccgatggatgggccacgcttccaagacactctttattgagctcttattaagccacccgcataaatacatataataaataaaaaa

SEQ ID NO: 1194 - DNA, 308 bp, Homo sapiens
  misc_feature (1)...(308): n = A,T,C or G
tttgtgggacaaacccattccaccgcccctccgnggagctgtgccaagagnaggggaacanggaggagaggaagcaggagacaacgaaccaagctcacgccctcnangaccgctnngaccaggccaccaccngcnaggggacccnaagggccttccaagagctcngngaccaccnggagctgaagcccaaggacnaccggcccttntaccacaagcncaagaccaagcacaaccacnggaaggccaaagccctctgggccaaaanggacaagcggggcagccacaaagacnacaaaaagggcaaaggc

SEQ ID NO: 1195 - DNA, 108 bp, Homo sapiens
  misc_feature (1)...(108): n = A,T,C or G
ccttgaagaccactctncctatggaagagggacaaaancccgcatctcatcntcaaacaagagggccagncacntgngcctgcngcacagggcccttggcactaggcc

SEQ ID NO: 1196 - DNA, 164 bp, Homo sapiens
  misc_feature (1)...(164): n = A,T,C or G
ggaaaccgtgtctcctgtttccagcagatctccaccagcatctctttccacacatgactagcaagtatctcggctgataggtgcagtgtacacctgtgtgttgacagngattatgagcaaatacattcatataaccattgtggttcacaggccaaaaaaaaaaa

SEQ ID NO: 1197 - DNA, 344 bp, Homo sapiens
gactgagacagctcgctgaggtcaacgactttgtctgtttggctgatcactgtgaccccaatgtttgcacagttgataccaggatacaaaatcacccaggagactccctcctggctgcgcctgcacagatatttccagagaagtttaactgaagaaggaagacatcccgaatgcaagtggcacccatcccacaggctagagtctgaatgaaaaaggcaacagagaaagatagctgaacaccagcattcatttctggctgctccctggtccacccagaggaagcagcttcctgttcctgccaccacgccttccccatcctgatggatagtgtccttctcaaactg

SEQ ID NO: 1198 - DNA, 193 bp, Homo sapiens
actgagatgcaagcaggcaaattaatgttgcagacaaggaatgggcagcacccagagctgaaggcaccctttggcagcaggagagagtgtacacctggcatccatgacctgtgaataagcaggctccctgcagaatgtggctctcctggggcttcctcactcccagggattgcttcttagcagaaaaaaaaaa

SEQ ID NO: 1199 - DNA, 443 bp, Homo sapiens
  misc_feature (1)...(443): n = A,T,C or G
tcttgaggacagtgcacngaaagccaggncaacacaggacancacgccttncctgagcatgacttccttnctgagnctctcaaagccctctgaggggcaaagtgtgtgacgnttatagncctgnacaaacatntgctccactctgccttgatgcagaanaaggantccagggccttgcangagctgncatcaggacatgtgccccgnagctacttttcccagctccatgaatttctggattccctctgctgtggattngtnntgnattngaacatttactgncccctccatcccccacccccttgcttcttctcatgctagggaaagaactganagttgcaggtccatgtgctttgccgctantcaatgcccaccaccagnggcccaatgccagtgtatttgatgtatactttnaaaagntccttcttagtcaaaaaaaaaaa

SEQ ID NO: 1200 - DNA, 116 bp, Homo sapiens
  misc_feature (1)...(116): n = A,T,C or G
gactgaggtctcgacattagcagtacagttnctttggtgacaancaacancatgnaagtgtccaccttcactcaaagggacaggcccagcgtcagaagagagctttccagaccacc

SEQ ID NO: 1201 - DNA, 435 bp, Homo sapiens
  misc_feature (1)...(435): n = A,T,C or G
ccaagcaatgcctgccttctaaaagcnactgancctggctgcaggttgcctgacggaaccaccacattaccccagctatggatgctannctgggtcctagagtttttctcttggcctccaagntcgccactggatgggatcttgacacactttanacctcagatactacnctgacctcagtccaaggacggngagacgttnaacatgccgtctcatttncttcaatgcaaagtttttgccagcatcaggnccttatttcccttcttctaanatggaaatncttttngagaatgctncacattaaaggaangaaanatcaggannccacantttnnngacagaanctctgngagtcgaccntnccnaccnaccggngcttncnttgntgngacacntactgtccacagtgcccncgangtgagggcagccatgcta

SEQ ID NO: 1202 - DNA, 111 bp, Homo sapiens
  misc_feature (1)...(111): n = A,T,C or G
actgagatgattaggtctangacctttgaggccatctnnctgnacatccncaacttggcattgaagagacaggnctagaagagacangtcgaaaccatgcttgagttgagc

SEQ ID NO: 1203 - DNA, 290 bp, Homo sapiens
aataggaattcctctagcgttcccatcctgccttgtcctgcctgccttccactcaacagggagaggaaaagacccgggctcatggaattttccagctcagcgttacagctgtttggtgttcttaggaaaggtactgagaagaaacctggaatctttaaagttcatggagagctgtggcaatgcagcaaatcccagctgtgaagaggagagacactccgtgagctgctgagggaggtaagtgcctgtgctgtgcacagcacctctgtgccgcttccactgctgtgtgtgtg

SEQ ID NO: 1204 - DNA, 107 bp, Homo sapiens
ggatcttgtctgagctgcacaaaaccgacatgtcctgccttccttccactcctgctggacctctctcccttggaatacaatgttgggcagaaacatgaaaaaaaaaa

SEQ ID NO: 1205 - DNA, 415 bp, Homo sapiens
  misc_feature (1)...(415): n = A,T,C or G
ccaaagggggggggggnaaaanccccccaggtcccttttttttttggggggggncctttccttaaacccccggtcaatanattttgccctttgggnacttnctttggganaaatnattccttaaccttttgggccttctttangcccaatnggaaacctaacttttgggancccgggggaaccaggaattttnaaaatncttcttnggaaaaggccaaggaaaccccaaggnaccaaaaacccccttccccttnccnttgggnaaaattnggaattttttcttttcccananaaattttcngggnaaatccatttttgggggnaaaaccctanccccagggnaaaaaacctttttnaaccttttgggcccccaaaaaaacccttnttttttttaaaaatttttaaaaaataaaaa

SEQ ID NO: 1206 - DNA, 428 bp, Homo sapiens
  misc_feature (1)...(428): n = A,T,C or G
tttagcactgggtccaatacagttatggatttgggcagaggaaaacaaagagtgcagacaagagagaagcttggagaaacaagatggcccngttnttaatttccaagancactttgagactgtggctctcctttgattgtaangggctgtactgtgattatactcttgancgaataanaggagcgctggaaaacaccccttgatgaatagcgcttttgcncatgnnaggagaaggaagcgccatantgcgcacttcaccacaaggccanggagaatatttttaaaagcaaactccaccgtantgnganaaatanaccagtccctacatctgtcttcagggacaataaatcatgaacaaatattntaacggcttcaanactacngngataaaagagaaattccccaaggcagnctagcatcctcattgg

SEQ ID NO: 1207 - DNA, 123 bp, Homo sapiens
  misc_feature (1)...(123): n = A,T,C or G
gactgaggtggggtctttnagttcaattcctgggacctccatgtcagagtcttctgatctcctcatgggtactgtggcttgtgtgcatctgctcctcccaataaataaataaacaaataaaaa

SEQ ID NO: 1208 - DNA, 467 bp, Homo sapiens
  misc_feature (1)...(467): n = A,T,C or G
cttgtgagtaagcacancagccacatccttgaatgtgaccagtccctgcaatgacacaaggtatcccatcaggacgtgatgcttcaggtacctgaggaggccagaagagttacaggtgactgagctgcctgatatttggtgctgggagcacctctgcgagagcaagngtncntaaccactcaattgtcttccanncccccaagagattttntgtactcaccaaagaatttctccaatactnanaattcaanaccagatctctttggggcctctcttctctactgtgagtgccantttgcatgagagccanttgcttanatnactatttttgcatcttgttctcntttaccannanntcccangctncnctatgaactatcctaacgncttnatctgcctggctccattnttgcatccnganctattctnancnttgccccactggaacccctctgagcaggatgaaa

SEQ ID NO: 1209 - DNA, 247 bp, Homo sapiens
  misc_feature (1)...(247): n = A,T,C or G
cttccttgcgcgtggccgtgaatttngtcctttactagcaancatgagctctctgaacagagatggaggcaatcatccctagccccagcgtatnaaatttcatttgtaaagacaaaaatacaagacagnagccatctctacgnggannaacangaagaagnnggngangaagannnaggnancnagaagtattgtnatagnatgctgcgacagggcgccacttnccattccccccccccctccccca

SEQ ID NO: 1210 - DNA, 301 bp, Homo sapiens
  misc_feature (1)...(301): n = A,T,C or G
tggggggcctgatcaaggctggtcggananangccccccttcctgcnatcanangnagttccttcctccttcctgctgncacccattatacatggatgcnagngtanttccctgccatctgcaggcanntcaccggagaaagctgggcancanactgatctttgcctgggnggggcacacttgtgnaangngncnttnntgagaggcctcctgtactncaatgagactggtggttgntgagcatancaacancaatgatctggtggncaccctactttntggcatcagccatcatccgacg

SEQ ID NO: 1211 - DNA, 318 bp, Homo sapiens
  misc_feature (1)...(318): n = A,T,C or G
cgagtgtcccgtcccaagggnacgtccccctgttgcggnctagctccacctcgctgccccttcctttggctcttcccagctggcgaaccgtgctgaaaacccgggggcgctacgccccgcacctgggtaacggagaacacagtcccgactacggtcccacctgtgcctagcctancaggaaaactgtaaccgtgggactcgatctgcccaccntgagcantatgaagattncattnatanagcccagccattntcctgaacgcgtnttgctatgactctgaccatcccgntgacagcgcagtacgtgtaccaggagga

SEQ ID NO: 1212 - DNA, 230 bp, Homo sapiens
  misc_feature (1)...(230): n = A,T,C or G
tcgatccatgggggacttggaggggagaacaggggatggggcagcactaaacagccgatgtgtagacgccatgaggtgaggattcagagtcagtctagctactcttcccagccgctctatatctctccctgggagccccagccctctctctaagccccgccccctgtgcagaatgcctnctctaagctctgnccctccgaagaatgccctgggcgccatgaactactaag

SEQ ID NO: 1213 - DNA, 197 bp, Homo sapiens
  misc_feature (1)...(197): n = A,T,C or G
gtatacgggtacagttgcancagttgcaaaccaggcaaacagatcctcacgccagagagcanctcttcaaacccacacccttcccagagtccacaacatgcaggatggagaagcatgagctaagctggcaacgcctccatgatatttaccaataaagttttactggatcacagccaggccaatgtataaaaaaaaaa

SEQ ID NO: 1214 - DNA, 102 bp, Homo sapiens
  misc_feature (1)...(102): n = A,T,C or G
aaaaattctgcccctagtcgcggaggcgcttcgcctggcttgntgnntactctgacccananggcctncgttnaagaagagaggcacagctcccagccctgg

SEQ ID NO: 1215 - DNA, 118 bp, Homo sapiens
  misc_feature (1)...(118): n = A,T,C or G
acttaggggaaccagccgcttacgatgatatgntgctcaggcccaagcctnatnccanctcctttgcaacaagnagcctgnccttgacaataaaaagaggatgtagggatgcccctct

SEQ ID NO: 1216 - DNA, 155 bp, Homo sapiens
  misc_feature (1)...(155): n = A,T,C or G
gactgaggatctcactttttagtcctgggtgacctggcaactctctatagaaccagnctaatctcagacttacaaagatccacctgcttgtgtctcctgaatatgctgtaattaatggtgtataccgctataaccagtaaaaactttttttattg

SEQ ID NO: 1217 - DNA, 384 bp, Homo sapiens
cagtaaatgaaattcagttcatcacgaaacactacttaaaaatgtacagtatggtttcctgaaaatcaggagtcagagatggaagctgctgcagcctgtatctagtggatccaaaccggagcgtggcagcacaggaaccaacctgctgtagcaactcagggccttcatgctgatcaccaaagataaccacctaggtgatcggtgatcccagaaaaagaaactttgcccaaaaccttggacacttctgctctagtgttcaatatcccaagcaaacactggctacagccagaaccacccctgtgtgattctgttcttcctggtgtggtcacatgggtgggggtaggggcccatacctgggctctaactccacccactggggggcgg

SEQ ID NO: 1218 - DNA, 356 bp, Homo sapiens
  misc_feature (1)...(356): n = A,T,C or G
taagtcttctccagctacgagagcagtgaggaacagcaatgagctttggggtaagcaggcaccttcctgaggntcaccagtgtggtccgtacaaacacatattcantatgagaattcctaggctgcgctgtgtaccgaaaataccataaggcttgntacggcggcacaggtctgtcatgtcaacacttgggtaccagatgtcagccaggactacataacaggacctgcatgtctagcatggttctggatattgacccgactggggcagcagaggactgaaggaatgatagacacatggacacagaaaagctgggatctggtggactgggctctctgaggaagcagaagtagcattg

SEQ ID NO: 1219 - DNA, 441 bp, Homo sapiens
  misc_feature (1)...(441): n = A,T,C or G
gggctttgtcctgggacaaccgtcatctctgttgattctgaaatttgatcagaggagagatcaaccgttggaagaagcacaaaccctgggccaagtgtgctttacaaacacatgagccctctgccgtgagtagactgcagatcaaacctcaaggtgagcatcatagaaagctgcagccgagtctacgcattcactaagcaaagcttgtgggacgtccacagagctcgtcgtctacgtgagaggtacagagtaaactatacagggaaagaacctactctaggaaaatattattcattcatccatccattcattcgtatcgtctcatccagagattcccctagatggcaaccatgacagcccatcgctcacaccttgatgcctttttttttatactggactccaatccnttggtccaccagttgaggtataaagatgtaatga

SEQ ID NO: 1220 - DNA, 170 bp, Homo sapiens
  misc_feature (1)...(170): n = A,T,C or G
ggacggagcccctcatcatcccaaccaaggcggtcacgtntaatngnccctnntgtgtactccannatnaccccttaccagagccanctgngcgtctcccgtgctgccttgntgaccacncctctgagcaggagcgtttgagcccaccnntnacacaccaccccccattc

SEQ ID NO: 1221 - DNA, 115 bp, Homo sapiens
  misc_feature (1)...(115): n = A,T,C or G
attcagtaaggatgacatagacgnccctctgtntgnagttnttntggagacatcctacggacgtnctatacgtntactnacatatnatatntattataaacgttaaaaaaaaaaa

SEQ ID NO: 1222 - DNA, 269 bp, Homo sapiens
  misc_feature (1)...(269): n = A,T,C or G
ggcatttgaagagganctgnnaccanccttnacccccttttgcnaaaacgcanaggagacagaagcccttctcaattactctatgaattagtgttgnttcacatnagagagacaataaatgtccatgtagaaatccttagctaaagactagcaacacttttattgattctctgagagtttcccatcatgtactcaatcgcaatccctcccatgtccaccctgccttgtgacttccccctacccccaaagaagcaacaaataaaaagaaa

SEQ ID NO: 1223 - DNA, 171 bp, Homo sapiens
  misc_feature (1)...(171): n = A,T,C or G
gatctgaggatccaacaggagggagcagccgttgnctaatagagcgacacggntcaggctgggatcttggagacaaccgtgaagaaacagccttacgaggcacctggtcataaatcttcctagcgctggcaggtatctaataaacaggccacgtgcctaccagcaaaaaaa

SEQ ID NO: 1224 - DNA, 235 bp, Homo sapiens
  misc_feature (1)...(235): n = A,T,C or G
acagactgcttagcactggccagactctgcctacactaaaagctgctccgctgggagtggccttaccctccatctctcgcctctttagcttcgggaggaaaggtccttttctcagccacccaaggtgtttagatctgcgctcacatgtacgtggccgtgtctacagcctcgagacttttgcgngccaggcctctagcttcagataaaattaaactctggaatcacgtaaaaaaaa

SEQ ID NO: 1225 - DNA, 177 bp, Homo sapiens
actgaggaagacctatgtgagaggagtattcgagaagacattctctataaaggaaggcagtagaattgtttcctccagtgctggcctcagacccaagcaagaggtacccttgcccaaggttcacacattaaaaggctcctctggggggtggggggagcagggtatgggggacttttg

SEQ ID NO: 1226 - DNA, 481 bp, Homo sapiens
  misc_feature (1)...(481): n = A,T,C or G
acaagcacaagccatggctcgagctgacctaccacgggagagtcaccaagaatgataacatggtgctggtggacctcccaccaccaccaccaccaccacacacaccatcgaactggataaagtttcactgctgtgctttgcagnganncagaanatnntangagntcatcanatnncnngnnnagagcggggnnntgnnagaagacagtggaccanggntctttncatnanangcagtncaaaataaccagctntngantctcngngcacatgatgttcatgaataaagaagatcancanatgagaaaagccatgtnactgntcanngggngaattgcttagcctaattgcatcattatgtgctatgccttgngcagataggcagatactgtcttgacacacacagcagagatggancacacatggactaagtgaacacttgttcaggacacagttagtgtggnggccctggggaccagtt

SEQ ID NO: 1227 - DNA, 181 bp, Homo sapiens
  misc_feature (1)...(181): n = A,T,C or G
acgtgcttggtattgnctcangctgaagactgaatgctactctacaggcggcatacacaagatacaaaagacacggtatgacaatccaccgcctctatgacnacaaattanttcacaggctctaagcaattanaaacnttgctnangcagncnncangagtggctcctgagggtcaaggtc

SEQ ID NO: 1228 - DNA, 222 bp, Homo sapiens
  misc_feature (1)...(222): n = A,T,C or G
gactgaggaggatcctgccttgantcgctggnctatgcaagnatcngnntatatttatcctantttacaggcccnctcccaagaactcacttttatgagttgnggcagggtttggtgcccntcntnntttggtattancgttttcnaancngacagggacagaacaggaaagagngaccttttatcctcagggnngagggaaaactcggtactaggggaaaa

SEQ ID NO: 1229 - DNA, 420 bp, Homo sapiens
  misc_feature (1)...(420): n = A,T,C or G
actgagaggtggaggccaagggcgacacagnccggctcaccctggaggcgctgaagagcctggtaaacaagccccagctgctggaattgacagagagcctcaccccagaccaggcggtggcattctggatgcctgagtcagagatggaggtcatggaactcgaactggggactggagtgcgattaaaaactcggggtgatggtcccttcatagattccttagccaaactggagctggggacagtgaccaagtgtaattttgctggtgatggaaagacgggagcttcctggacagacaatatcatggcccagaagtcttcagagaggaacacagcagagatccngagagcaaggagacggggcagaggacgaggaatgggatgactgaggtgcctnctcaactagaccagcatctgggatg

SEQ ID NO: 1230 - DNA, 204 bp, Homo sapiens
  misc_feature (1)...(204): n = A,T,C or G
gactgagtggaagaggcagaggctatagncctgggtgtgaattccaccagaagtttgctctcagtcaccaaacagttttggagtaattcacatttccatttcttatgttctttttgttcactacaggaataaagatatatttgcattctgttattatttaataaattaccacaaacttacaagtgaaagagccaaaaaaaaaaa

SEQ ID NO: 1231 - DNA, 499 bp, Homo sapiens
  misc_feature (1)...(499): n = A,T,C or G
tcctccatcagagcccgancatgggatgaggnccnagatgcncaganaaagggatcctgtctccctgtccaggtgagagagaggaaggatntgagacaatcaacaaatcagccagngcccaggccaagaatnngagccgactgttcacaaaagcaacatatctnacanagccttgaattatccatancatacctccaggggncanggggccacacattntgcctctgagaccctggaaccttgacataatccaggaggntgagataananaactttggagnttctgtacagcctactgnncacnactttaagtactgngcgaaggaactggctgccagaaagtgtaagagtgcatgtggaggggacctcaggagaccagaggctgggacaagggagttgctgccagccaaccctgggaatgcatagtctaatccagacccaactgaaaaggctgtcactacccggaactacccattcccagagagcagtcacatcccct

SEQ ID NO: 1232 - DNA, 259 bp, Homo sapiens
  misc_feature (1)...(259): n = A,T,C or G
ccacccaggcccaagtctaggagaccttttgatctcccgnntgtgttcccctttngttttatctttngntggtntgctttgttttgaagacagagactcactgggaagctcggtactcngnnactcactactagtactaanctgaccttagactcgtaacaatncacactgccaangnccttcgtganagccatggcttagggacgngcgctggcccncctcccagntcttaacccactgngggttttccttcctcttt

SEQ ID NO: 1233 - DNA, 109 bp, Homo sapiens
  misc_feature (1)...(109): n = A,T,C or G
cgggcgctccgtgcattggctgactgcctngtgctngnatggggctgggcgtgncngccggcngtcggccaccgcnccgganngcgatggagaccattccgacctgcac

SEQ ID NO: 1234 - DNA, 148 bp, Homo sapiens
  misc_feature (1)...(148): n = A,T,C or G
agcatgaggggctgttacanncnctcactgtggacctagattcatcanccagatcttctgtgcctgtggntggaatcgttcttggtttattgctggtggnagnggccatcgcaggcggtgtgctgctgnggggcaggatgcgcagcgg

SEQ ID NO: 1235 - DNA, 146 bp, Homo sapiens
  misc_feature (1)...(146): n = A,T,C or G
catcgtgacacctgagcagacanaagctacccacatgcctggtcggntgtacctctgtgatnggaccagatgtacangctgaacannctgctgactcgaanganaancagtggtgggacgacatcancattctagctgtgccgccg

SEQ ID NO: 1236 - DNA, 129 bp, Homo sapiens
  misc_feature (1)...(129): n = A,T,C or G
gggctgaggccgtcctccccaggnagccggcgtgccgaggaggggcgtgctgnncaccataacattccgnagatggggctagttttatatcctatantacaaagnncactatggtggcaaaaaaaaaaa

SEQ ID NO: 1237 - DNA, 209 bp, Homo sapiens
  misc_feature (1)...(209): n = A,T,C or G
tgacagcaatgatcagtaaagnaaggcaaggtgaaccaataccacagcatcatcagtgaagaccagtgtcagcaaagcccagtgaagaccagcaaagagtggcaaggaaaaccaatatgaccatgttatccattgtcttttggatgatacttgaatcatgcctgtctgcagcacagtccgatgagatcctgtctttgcctgagaaaata

SEQ ID NO: 1238 - DNA, 197 bp, Homo sapiens
  misc_feature (1)...(197): n = A,T,C or G
gccctgcattcctctcgagggaaaaatcgacaggcgaggaaccggctcaacctgcgtgccttcctcactgctccactcgtccaccgcagaacttggttaaaaccctggctgtgcatatttcctttgtccccgtcatcttttctcagtatnttccaacacgcccacntccctcgcctctcaccagctggaggattagg

SEQ ID NO: 1239 - DNA, 156 bp, Homo sapiens
  misc_feature (1)...(156): n = A,T,C or G
tgaggactgagggaggagatgtnccctcccctnccctanccngagnctgcttgctcggggagnagctancngctnattctgtctgtcacanccnacntgatggancctgaggagccacacangatgcacctttctacttggaccatgagattattc

SEQ ID NO: 1240 - DNA, 106 bp, Homo sapiens
  misc_feature (1)...(106): n = A,T,C or G
actgcagacctcaactttggattatgttgcttcaattttttttangagcattatattctttngngcgtataaaaaattntcatcattctcactctaaaaaaaaaaa

SEQ ID NO: 1241 - DNA, 145 bp, Homo sapiens
  misc_feature (1)...(145): n = A,T,C or G
actgaggtatgagccctcacttggttttatngctgcactngngcttgnntggggacttgtgtagcccangcagtcntggcagatgctattnactagggnngancttnancttttggactanccacctgcgtcctatgcccccaag

SEQ ID NO: 1242 - DNA, 179 bp, Homo sapiens
  misc_feature (1)...(179): n = A,T,C or G
tgcgtgtgcgtcccagcatgacccgtgaccncggcatctnncagacccatntngnncagggccggnttanattgaccctnctctngtttntcttctacccctnccatcgcggnaggctgntcccgggcgaaatcggagacaatttcaactctgagaggagcaacccagcaagcgaaata

SEQ ID NO: 1243 - DNA, 298 bp, Homo sapiens
  misc_feature (1)...(298): n = A,T,C or G
gactgagagactcaacaatatgtcatccaaagataaccatcttgaccatcaggaactaatgactgaggggtgcaccacagaggaactaagtataaagcggaaagagaagcattgcaccatgaatgtgaacctgttgtttggaggacccaattctggagaagactatgcttccaggtgacatcaccttactcagataccgtggactctgctgntgttcttccttacataatccttcctnatgatcctgttcccctnatccattgngatattttgatcacaaaataaactattacatagt

SEQ ID NO: 1244 - DNA, 112 bp, Homo sapiens
  misc_feature (1)...(112): n = A,T,C or G
gactgagatttgggggtatactgaagagcagctgagaagncctgcctnatanactgaacagntactgantnctnggatcttccttnggnagacagcttgactacagcctatg

SEQ ID NO: 1245 - DNA, 224 bp, Homo sapiens
  misc_feature (1)...(224): n = A,T,C or G
ctggggccatggaggagcagcnaagccatcaatagaggnacttcagcaggcggaanntctgaggctccggtnagaaagaagaagccgtttgctaagaaacgaaactggcgctggtacagggnggccaacaagggttagactccaggcttgagattccaccgtcagcttcaaacaaccctgtggntnnctnaagtcgaccgaaggtatgcctatcaacctctggg

SEQ ID NO: 1246 - DNA, 231 bp, Homo sapiens
  misc_feature (1)...(231): n = A,T,C or G
ttccggtgataaactagaanagcganggcaccantaaccatntggagtaggctgctgagcccatggctcctgctaggantggtgngcaccttgcagtntatgaggaggagctgtgctgagtngagaaactgcantttgctgntgccattactgccatggggaacttgctggagccgannctgacctgtaaatcctgaaccagaagattgggtagagcatgacacctccccc

SEQ ID NO: 1247 - DNA, 165 bp, Homo sapiens
  misc_feature (1)...(165): n = A,T,C or G
gccacttgcttgaaagtcaantggtggtcactgnncttnactttgcaccatcttnnttgctcttnnntgtgtcaggaccngaaccttgcaggtggagcntggtcttctgccttgttgagannagaatataaagctctaagctactgctccagcaggatgcctgtg

SEQ ID NO: 1248 - DNA, 266 bp, Homo sapiens
  misc_feature (1)...(266): n = A,T,C or G
accagggaggctccaggatngacagagtngnngaantnagcagtacccataccagaccaaggagtcaatgcaangaacattgaaaatanggagttgccattcccacttgnnngaagagaaaganggaaggagccaacaggaggtgagaaagcagtgncctctgagggacagcgtcccttnggggaaatgnnagactgttcagctgantgaggangctggngncaaaaacaggacagctgcagnctncagnacgagaaccacttcat

SEQ ID NO: 1249 - DNA, 103 bp, Homo sapiens
  misc_feature (1)...(103): n = A,T,C or G
actgaccatcacttacctnctgcccgaggcctcctgccatggngagctggncgaccatganncagtaacagggatagngagctgctncggggtgcagggaagg

SEQ ID NO: 1250 - DNA, 240 bp, Homo sapiens
  misc_feature (1)...(240): n = A,T,C or G
agaggagcccgagggcggnagggagccgcgggccacccctagngcactanggggagcgggagagccacacagagngagcccagagcggcngangccgcnagaggaggagcnaccnggcgcagggngcagagcgnagcaggcagagccgggnaggccaangagaccggannaccannggngccgggagaacnacagccaggggnggcaagcngccagaacggnacgcgcgaggccaggaca

SEQ ID NO: 1251 - DNA, 123 bp, Homo sapiens
  misc_feature (1)...(123): n = A,T,C or G
ccactgcggctatcctggagctnatnatgtagacnagactggcctangagtnaagagngtcngagtgcctgngngcctcctagatgcatgggattaagggttgtgtgccaccaggcctggcct

SEQ ID NO: 1252 - DNA, 225 bp, Homo sapiens
  misc_feature (1)...(225): n = A,T,C or G
cccgacagcaggagccctntnctnctggacgctgactcagcacgtntcnnggnncccagcctgcaaaactgaaagnagccagcctntctttnagccccacccggngcccaggcaatggtctttanacncaggccgancntcggctgccactccgnaagacatgcccagacacatnngcggacnagcnattctncccttctcagagccccctttgcaaaaaagaga

SEQ ID NO: 1253 - DNA, 139 bp, Homo sapiens
  misc_feature (1)...(139): n = A,T,C or G
ggttggccgttgcaacgngccagcgcngccaggcccggnnngcccncacagagcgcatnggnaacagcaatggggaannctaccatgagcactgattngtgtgngcccagngcttccggccatttcccgagggactctt

SEQ ID NO: 1254 - DNA, 174 bp, Homo sapiens
  misc_feature (1)...(174): n = A,T,C or G
ctgagttactggattggtgtangtaaatccagacagtccatgattcagctcttctaaggattgccagcaacgcatgagacactccttaagaggaagggaaaaagacttaaacatttctttgtgatctgcaaattcaagaataaagacattgaaatgagttttcaaaaaaaaaaa

SEQ ID NO: 1255 - DNA, 175 bp, Homo sapiens
gttttcttagccctctaggctaagtaagacacctatctgaggtaccaacatggacagatgctgcatagccaagagagacaaaccggagcatcaatgagaagaaatggccgcattgaactgaagcaccaaataggcacaaatctgcagattaaagtggtgaatgtaaaaaaaaaaa

SEQ ID NO: 1256 - DNA, 145 bp, Homo sapiens
  misc_feature (1)...(145): n = A,T,C or G
acactcttacatgggcacaagcannagctnttgacgtcttcttcgaatcnctcccgcagtacaccanttcaaccctaagaacacgtatctgacgtctcgttcaatacntctgaaccannaaaagacttaaacccaggaacactaa

SEQ ID NO: 1257 - DNA, 198 bp, Homo sapiens
  misc_feature (1)...(198): n = A,T,C or G
acttgctgaaaggttacatgacaacatgtgcncacactgnaggncatcatattatggacgtgagccagncnaaaacntttgncatccnaacngatttctgatangcctganttnaagagangcatacngtgtcctggaagacctgcaggttgggacagntcttacaggcaaagtgnanaatgctacttctgtttgggg

SEQ ID NO: 1258 - DNA, 136 bp, Homo sapiens
  misc_feature (1)...(136): n = A,T,C or G
gaaaaaacgacaggagtggactgtgaccagcgccttcggcttttcacngtgtttnananncngccatagcgtctcgatgattggtnctacagagctcacctaggngcctggcagcctggcatagcttttcactctg

SEQ ID NO: 1259 - DNA, 243 bp, Homo sapiens
  misc_feature (1)...(243): n = A,T,C or G
attgattattctccttctgcaatnaagcnttctgtttagtattntagagaaagaagggctatcctaacattaacttgaaggtagaagactttttgaanccctctacaaagcctntctggatttcatgnttgtgtnngacaaagggacttacgatgccataagtnntaatcctgacanntgcnntcnganaagangaagcannnatgatgangactctctccagggggttggaagataaaaggc

SEQ ID NO: 1260 - DNA, 142 bp, Homo sapiens
  misc_feature (1)...(142): n = A,T,C or G
tcttccattgctatggcgtccagcatnagcactccacagacagaaagcctgtggtgaggagcatgagggnatctgcnnaggcttnntcttcttagaccggcttnctntntnnagccctggctganccggaacgtcatacttt

SEQ ID NO: 1261 - DNA, 129 bp, Homo sapiens
  misc_feature (1)...(129): n = A,T,C or G
ttgagtttcaggcatttaaaantnaccacacttcagcacggcaggaagggagaaaacatctcaaggcagcntcaacaataaaacaggcaaacaacaacaaaaataaacaactctcaaaatgcccagaaa

SEQ ID NO: 1262 - DNA, 201 bp, Homo sapiens
  misc_feature (1)...(201): n = A,T,C or G
atctgagatgctgagaagaggatcaaggtggagaagccggtagtggngnngcacgccgntnngatnngctgaangatgnggaggcagnaggatgacaagttcagaggtnantctggtngtangcatanctaaagaatttngaacttgganattaaaaccgtgaccagaccaatgaccaggtaannattgactctgatatgg

SEQ ID NO: 1263 - DNA, 115 bp, Homo sapiens
  misc_feature (1)...(115): n = A,T,C or G
gactgaggttggggatttaagagngngagatnggcaacaggtgnctgcntccatngangcatgtgcctttgcnaggntctaagaacagngtgcagagnatggatatgctgcgctg

SEQ ID NO: 1264 - DNA, 367 bp, Homo sapiens
actgaggtggggtctttacatggaggacacggtgaggaggacccaccagaggagaagccacacctgtgacaggatgcaagcttgcgtggatgatcgccggaatagttcactgtaatttgcataaccagaccatcaccgccatcagccaacctccatcccaaaggaaagatgtagatcctttctcaaggtcgaaggatgcttttaaaaacacacggctactgaatgttcaacctggtaaactgagatgtttcgggaatgaaacagtaaacgtgcctgtaatcattttttcatagctcagaaaactatttttgtctcccatcttttttacacatgatatattaaacaaaaaaggtaaataaggtataaa

SEQ ID NO: 1265 - DNA, 118 bp, Homo sapiens
  misc_feature (1)...(118): n = A,T,C or G
cgcatttcgcgggaaccgnancgacagatttncgggggaaacaagacacagatananggagcaagcgngagaagcggnngacnccagangagcganagaaggactatgagccggaaaa

SEQ ID NO: 1266 - DNA, 341 bp, Homo sapiens
  misc_feature (1)...(341): n = A,T,C or G
gggagctagagcccatgganntgagatgngaccagccctaccttactggnccacaggctgcccaccaccttaaaacacctgcggatcttagncaagggggacacccacatggccccatgttcgctgaagatcaccagaagctctaagctagccgggtacatgttggctgttggacataanggagccagnactaccctnatgggaaggccagncttccctgnatggagattgatgctgcttctcccagggaccacatnctctctattcctaaacaacctgagcgttagggctgcccacgtgagccccacagctactgacgtcaataaaattctaaataccaa

SEQ ID NO: 1267 - DNA, 258 bp, Homo sapiens
  misc_feature (1)...(258): n = A,T,C or G
gtaaccacaggaggtgtgttgtgggaaaagaaccngaacagcaagtgagcagaaatgcagcanagtttttaaagagcctnattanaangcanccccaggacctgcncttggtcattgggactggcgtgagcgcagctgnggcccnaggcnttcgagcgctctgctcttggaggagctgcattgangccggcnatngaggctgcggagcagctggaggttctgtaccctggcgacnctgntgagttccggaggaaggcg

SEQ ID NO: 1268 - DNA, 182 bp, Homo sapiens
  misc_feature (1)...(182): n = A,T,C or G
ggactcttggcagcctgcagggagagaaaggccanatcatcttccctggctttgtcntgctcctgaccattatcctggtcatnatagctgcctgtatcctgtggagctggaagaaacagaanaagcggcctgtttcttacttccaagnanctccatcgttgactntgcctccaccccttgca

SEQ ID NO: 1269 - DNA, 212 bp, Homo sapiens
  misc_feature (1)...(212): n = A,T,C or G
aggaagtcatgtctgctaaggactcccaggaacccctgcttcccctgntggtngngggaatcgnacccagagccgtacaagtgagnacatacngggccctaagactcagcgtgtatctgtgcatttgtttgnattgngntgcactgtgntttgntttaaggcaacggtcttactatgtgtacccaggcaggcctngatgttgaaattcttcc

SEQ ID NO: 1270 - DNA, 312 bp, Homo sapiens
  misc_feature (1)...(312): n = A,T,C or G
gactgagattcccttccangatggtctgccatgactagcacagctccagngatggacctgcctanactgacgaggtggctaanaaaggagctgcncacanagaagaatggggactggctggcctgggccctntgntggagaaccctntgtntcnanaaccacagcgtatttattatatacagcatgaacagggggccttgggttagcgcataccggctgaaaatggaggcatttctagcagctctgggcggggacagtctctgtagcggagcagtctttgggccataaacatccagggagaggaagctacaa

SEQ ID NO: 1271 - DNA, 507 bp, Homo sapiens
actgagacctaaacagcaactggaagggagaggggtcatggctcatcctaacccacagtgccagataaaccaagtgaagctcaagttccaagtttctagccgggtttggagaaaagacagaactcctgttgttgggactttctgtactgcccctctgccggtcaatgacagcaagaagacggtctgcatacctgagccagtgcgtctgcaagcaggcgtgcctgctttccaggacctgaaaatagcctgcgtgtagcccgagcctatgcaggaggcagtggccgcagttttccgagggcagtgtgccaagagctgtttgtgagagccgtatttcaccccatttctactaaaggggaaggccaaattcttggtggttttccctgtaagcagttactgtggaggggacagatgactcatgttacagaccttgatctccgtcaccaacatctaacgctttacataaatgcccttttagcttctctatttcgacacaactgtgattacctc

SEQ ID NO: 1272 - DNA, 255 bp, Homo sapiens
  misc_feature (1)...(255): n = A,T,C or G
ccatggggacccaagttnatgccntcngacacagcatatcatgnggncctggnggnatcatnnccaaanntatgtgnnnnanncctccaagcaaggagatcaatggtttnctcatncnctaccatnggaccctgcttgtagcgtgacccccgtcagctncgaatccaaaaagtttggagggtcctggtgcccgnncccnataccagaaatctctaccgactaggcccatcttaaggataaggggtttacctttgt

SEQ ID NO: 1273 - DNA, 372 bp, Homo sapiens
  misc_feature (1)...(372): n = A,T,C or G
accgccaccggggttttttttcagcaacgacaaccatactgaaggttagctgtctcaaccttttctncagacaacagagaantttctctccctcttagattttggattcaaaagcccaggatcaaagacttgcagcctcctggtgctggagaaatgtctcagtgcgctaagaccacacactgctcttgcaaaggacccaggnncgntncccagntcctacnngnntgctnatnnccatctctntctccagagaaccanatgccctcttccttcttnngggagctntngcacacanntgtgcacataacctgacacnnncacacatccacacangnnnatnnnntgattgaganctntttaaaaacagaggtg

SEQ ID NO: 1274 - DNA, 133 bp, Homo sapiens
  misc_feature (1)...(133): n = A,T,C or G
ctacaccatgagatgctacacctgagcccanggtggaaaggagtncgaccaangtccctcaagtccgntgnnacgntgactcgagacctgantgacaagcctgaaancagcagagcntggaacagtcaagccc

SEQ ID NO: 1275 - DNA, 132 bp, Homo sapiens
gactgagaagattatcctagtaccaaacgggcctcagaactccttgtgaagctgaagatgaccaatattctcattcccctgcctccggttcttaggcatgtgccatcaagtctgggctcttttttttgtgtg

SEQ ID NO: 1276 - DNA, 102 bp, Homo sapiens
ggtccttttggatgttgtctagtctcttccgctgaggatgccccgccccactttactctgtaataaactgtatatacctgctacactttaaaaaaggaaaaa

SEQ ID NO: 1277 - DNA, 410 bp, Homo sapiens
  misc_feature (1)...(410): n = A,T,C or G
actgaggactgacgtcgtgggaggagacaccactccttgaagttcacacacactaaaaagagcaccaaagagctgtgtttcctcacagttaataagtaccattgaatagcagaaatgtactccagtttcaagtgttaaagtaccacgttgtcatgttgtatacgtggcccaaacttctctgggaaacntgttaatacaaatgtctgttacntttatactctgaagtgaatgtttagagtttatatgcatctcaaattatttagtaagactaaagtgaaaatatgttatatgaattttgctaagcaacatagataaatgttaataatcatgcatatccataagttttctgtcacaagctatttttcctcatcctcttgagcattctattctccataataaacaaaaacaaa

SEQ ID NO: 1278 - DNA, 218 bp, Homo sapiens
  misc_feature (1)...(218): n = A,T,C or G
aagaccagccagccccgctctaccaactgagnttgactggcaaacaccacaggcttgcaaacaacagcaggacggtccagaaatgaactacagtgtcccaacgagaacagcagagggagacaaaggtacaacaaactccagatcaggtaacaagataatttttagatagttaaagatgagaaacaaaataaataccttttggattttaaaaaaaaaaa

SEQ ID NO: 1279 - DNA, 241 bp, Homo sapiens; identical to SEQ ID NO: 13

SEQ ID NO: 1280 - DNA, 502 bp, Homo sapiens
  misc_feature (1)...(502): n = A,T,C or G
gcacccagctgggcaggctantttgacgtagcaccggcaaaccacccagggccgcgtccnttcanactgngngngntccgcnngcctgtgagcacangngngccantgccannatanagagacaggcttgggcttccttttcanagctcacatcctccctgagcacnaaggagncctttaaggagtaattcgtctgtggaannggaaaccagnactgancnccnggtccccttnncacctggtgcagntgccttggcccctcatccaaaggcaccangnnntatggtcatggaagccagctcaatattggtttaagaggatgctganagaacagacaaggtgngntgggttgangggaaccagncagggcntgngatganntcctgctncttnttcattcctgtgtatngnccgaatgaaatngcangactaacagacgtctacagtacagnagcttgcatcacangtaataacaaaataaancctgatgcttttgttttta

SEQ ID NO: 1281 - DNA, 165 bp, Homo sapiens
  misc_feature (1)...(165): n = A,T,C or G
gactgagcttcgcgacgctggatgttttgatcanatctcatanngccgattggataccatatttaaattttgaactcagccactgnggggagcgaggaagganagtcacattgacaaagangggaggcngangtggcaggagcttgncagtgaaagagatgtaaa

SEQ ID NO: 1282 - DNA, 227 bp, Homo sapiens
  misc_feature (1)...(227): n = A,T,C or G
aggcttgaaccccaacgggtcttatgagggntatcgggctctgcattcatatatttattagccctgttgtgtctgnnccttggatgacacagtncttggagncatccgccacctctggctgttgagagtctctctgcctccctttgggtaangggnccctgatccttgaggcaaagggtttgatgaaggcgnnccatnnanggctaagtgctccaaagattcactct

SEQ ID NO: 1283 - DNA, 138 bp, Homo sapiens
  misc_feature (1)...(138): n = A,T,C or G
aaaggagggggaggaggggaaagntttggggnaaagccaccaggggggtnactttcangggccttcccgggaaacttattgtttcccccagganggattggaaaggnanccttgnaaagaagggaaggccggggttcc

SEQ ID NO: 1284 - DNA, 367 bp, Homo sapiens
  misc_feature (1)...(367): n = A,T,C or G
ttaaaaaggccctttacccggccttttaggggggctttgggaaaaccccattgggggncntttaagggaaaccgggggcccccccattnccctttcnttttaangggttgggaaccccaaggctttggggttcccctttgggggaggggaaaaggaattttcttgggaattggaaagnaaccccttaaccgtttttnccccccagggtngggaaggcccaaaggnaaaaatttccccttttgggaacnttttttgggnccccaagnaangtnggaaatttgggggttanttttggganccccctttaattccaangggggaaanccccaanaaaacctttgggatttgntgggggcctttgggcccc

SEQ ID NO: 1285 - DNA, 199 bp, Homo sapiens
tcttctgatggagaatgctgtacaagattggaagtcctaggcagattccacatttgctgttgctgttgttctagtctgtactggattctgctactcccttccactctgcaattaagaatatcaaatatcaaaaaaagacctcacagctgaatgtgtctcagagagaactatggaccttcaacgttttgaaaaaaaaaaa

SEQ ID NO: 1286 - DNA, 114 bp, Homo sapiens
ggagggccccctttctcttcgatgtcaccaaggactttgtgcccaggctggctttatgggaacggctcctgtgtctcagaagaataaacatcctgtctctgggaaaaaaaaaaa

SEQ ID NO: 1287 - DNA, 183 bp, Homo sapiens
  misc_feature (1)...(183): n = A,T,C or G
tctggcaacctctgcccctcgngacctctntgatgtcctgngnctctgtccctgcaccggcacgnctgacanaccctgtatggaggtgntgacgagacacgntcncatgtancaggcatgnggaaatatttgttttaagacccacnngacatctntaccgtggaaatacacacaaatcctagc

SEQ ID NO: 1288 - DNA, 277 bp, Homo sapiens
  misc_feature (1)...(277): n = A,T,C or G
actgaggttgtaaccggagcaagagcgcaaggcagaagcctagaaacggaagcagggatcatgaaagaaaactctggctctctttccaaggtttgccngncctggacatttttgctgaatggtngtcacactgtgtgntctttttgtgacatgtncttcatgaaanccacntgattgnaangtnttnagggatcacctacnttacaccaggacgttcattctttatactgnnccaggccattctgntctgtctctnttattgggccttggatatgcc

SEQ ID NO: 1289 - DNA, 167 bp, Homo sapiens
  misc_feature (1)...(167): n = A,T,C or G
gattggagttccaagccacttncctaacgatcagacctggacacgttgncatctgctggtaaatcccaacatggcaattctagcctgaagactccaacttgtttctacctatcgttggaaagagttccaaacatncatcactataaacgagatgtgaaccttctctg

SEQ ID NO: 1290 - DNA, 285 bp, Homo sapiens
  misc_feature (1)...(285): n = A,T,C or G
ctggttcccaacaaggactgtgcagagattggnccaaaggaggtcncagctnaagtgganngcaccaaagtaantnattngtcatcnnantgtgaagtgccctgtagggcnnnggccagntcagggntcctgggggagcaccctggngaagacctctgaaccatgccccaggnttcaggaaatgccttccgtggtgggtgatatgaagggtaaggcaggttnaaatcagcaccaggaattgnccggtgagtgtggcagngacngagtccactgtagggaaaaact

SEQ ID NO: 1291 - DNA, 309 bp, Homo sapiens
  misc_feature (1)...(309): n = A,T,C or G
tcctactcagtacaggtaagctgctgtccagccatggnagggagagganaagccagctcaagaggctgangnggaacctgtggcancagcaggcacctnagaagcagtgccaagggtgcttgctggagaccctcanaacatctntgatgtggatgccttcaacttgctcctggagatgaaactgaaacgacggcgngaacgccccaancttccacgtacagtgacccanctagngnccgaggatgggagcagggtgtatgtggnggncactgctcncttcagngatgatagcaagagagatgtagtaaa

SEQ ID NO: 1292 - DNA, 103 bp, Homo sapiens
gatgtgagctagctattcctgccaccatgccatttctccactaccatggactctaaccctctgaaaccataagcccaattaaacactttttaaaaaataaaaa

SEQ ID NO: 1293 - DNA, 180 bp, Homo sapiens
attgagctcccaccttgatctagttctgttgagactcaatggtactatgttttcaatctatgacgttgtgagaccatgcttggcaggatgatctttgtgagttcgaagccagtctagtctacggagtgaattccaagacagtcaaagctacatagtgaaacttaaccaaagaaagaaaaa

SEQ ID NO: 1294 - DNA, 241 bp, Homo sapiens
  misc_feature (1)...(241): n = A,T,C or G
ctcccagcttctgaagcaggaggctaccatctgttccagctngancatcagcgcaggtggctgnttccttcctacctaacttcctgggaacnggngtggnctctggcaaagcacatccacntncttgagnttctggtggcactctctntctntcactgngagaanagagcatctgcctcacatgtgaatgctggggacagcatgcannangaccganctcagnatgcctgctaccacccta

SEQ ID NO: 1295 - DNA, 110 bp, Homo sapiens
gactgagaggtcctgagttcattcccaggaaatcacatggtgcctttggaatccgatgcacacttttggtgtgtgttggaagacagctgcagtgtactcatataaataaa

SEQ ID NO: 1296 - DNA, 290 bp, Homo sapiens
tgagacaccgtgggagactcttacacatgaacaagtttgccatgagatgcagccttcccccctcctccgtagactgaagggtgtacgctggagatttcacagactggatacctgtctcctgtccctcctgccaccctagctactgcctcctgcctccggctacctgcctcccacctcctgcctctgagtttaagggcagtgcctgagttggcaccattggtggtggacattgcattcaggttttatgaacaggatcccacttactacaaacaccttcctagtcaaaggcc

SEQ ID NO: 1297 - DNA, 437 bp, Homo sapiens
  misc_feature (1)...(437): n = A,T,C or G
gactgaggttagtcctgagcccagtgctgggcatccctcacccagctggatccttgcctcatagttcatgcagatgaggaactggctctttgtncnggtttntgncctgnntganctcnangnnngactntcctttggtgatgaacagnnngnacgggagacgtnngncatngannccntgnactcnncngnaagaagngtnnnnggggaggagatatgtcaaatgtgatagcataagagttgtcacagagcaccctccctgcctccccacccccacccccatacaattgatctttggccttccatgggggcaaggtgagaaaagtcactgttagtgtgacctagcggtgatttctcaaggacctgtgctcatgtacaggaagagtgggggaaataacgactaaaataactaaagagatttacccacaaaaaaaaaa

SEQ ID NO: 1298 - DNA, 259 bp, Homo sapiens
  misc_feature (1)...(259): n = A,T,C or G
gagcttttaaggtgctgccctgcccgncttgagctggacccattgagccacccagaggactgggagcctgagcgatccccagcagacctgcccctaccctttctgagaagcctgctcggaaagtaaagccactgctttgctgatgcgctggaaactcaggcatgaacacatgtggagcacattcctggagtctggccccaccaatttgcttaaacgcgccaagaataaaggacgacgacgaaaacccataaaaaaaaaa

SEQ ID NO: 1299 - DNA, 136 bp, Homo sapiens
  misc_feature (1)...(136): n = A,T,C or G
ctcctactgtgtgggtctgcgtttcaaaggatngtgacaaggattgcacngtangcacaccttctcccgctgagccgccctctttctgntganaaatataactgagatggccagttcagccgtcttcagtgacaga

SEQ ID NO: 1300 - DNA, 302 bp, Homo sapiens
  misc_feature (1)...(302): n = A,T,C or G
tcttcagtggcgacccagaggagattcgcatgctcatccataagactgaagacgtaaacgcactgctcccaagactcccttcctccccgactccccctgccatgtgtgtaaaggagatcttgaatcccacatctcacaggcctgtnggcctgtgttgaaccaatctctcactgccaatgtaggtcattnggagcaaggctccttaatcattttccacgtgacacacactctgtgcaagacattttttttatgnaaccttgggtataaaggcatataaaataggnttgataaaaaccaaacat

SEQ ID NO: 1301 - DNA, 348 bp, Homo sapiens
  misc_feature (1)...(348): n = A,T,C or G
tgaagaacactggcgtgctcttgcagaggaccgaggttagatgttgcagcaccctacatgntggnatcananncatntntaacttccaattgtagggaanctgatgccctnttctggcctgttnaggnnctacncacatgtagagnncagncntacatgcatnnnannnccccaaccncataaatnaaatcaacntaatgcatntttaatgaggaantctttgnanaaggggaagnnacctcngcatgctgccaccaagtggctgtccagttctaagttctgtatcttcctttatggcccacctagggggcctccattgtcaaacccaggaggctaggatttgctctg

SEQ ID NO: 1302 - DNA, 297 bp, Homo sapiens
  misc_feature (1)...(297): n = A,T,C or G
gcgtcttatctactcatgtggcctgattcaatagaatgtgtctgaaaactttcacacattctccaagactcccaagtcagatggacccaatggaatgaaacattaccagtgtgatcactcacgtgttccagtaggagaagtcatgaaggaacgatcttcctccttaaattacttattgntatgatttaaacatgataatcctacatttagaaaatggactaagccaggtttgtcactatcactaggtggtggctgncaaatttgtgctaagaaacttcttctcccaaacaaaaaaaa

SEQ ID NO: 1303 - DNA, 128 bp, Homo sapiens
  misc_feature (1)...(128): n = A,T,C or G
catagccagtaggagtaaagcgtgaccgttgggcntggtgnagatgagtgggtnngngcacgttggataaggcntttagcggattgcatntgnagtaccttaagaaatattatcgagtcttggagtaa

SEQ ID NO: 1304 - DNA, 184 bp, Homo sapiens
  misc_feature (1)...(184): n = A,T,C or G
gactgagcctacaggcantggaaacacaggacacnngcccatcntctgancaagccnctgtccacgcgncgccgctgacgtcaagaccgtatggctagtcatgaatnnccnncacagcgccnaggngangccttacngcctgacccanagccgcgccctcagtgagaacatactgctcctgctg

SEQ ID NO: 1305 - DNA, 399 bp, Homo sapiens
tgagctgtagaggagccggttagaactccagtaatgcatgtttaatgtattaagagaaagggaagaagaaaagccggcgtccaccccgaatgttatgtccacagacttgcatcggggacattagttcgggccaatgaactctgagtcaagtgtggagccgtggacaggggccagggacccccgccggcggctgtcatatctactgaaagctcacgcatcataactgtgccgcgggacaggatggggacaaatgtctcacagccccagaggccgccaccaagcagtccctcccctcaagtctgtttggagccaacctgttgctgtcatggtgcaggccagacccacctcccacctgaccccaggcaaacatcagccctctttagctcttaaaaaaaaaaa

SEQ ID NO: 1306 - DNA, 514 bp, Homo sapiens
gaactgaggttggtgaatcctttgcatgctgtcaggtggaaggaatgcaagaaagtttacaatcccagtgccacactgatgtcccaattccaaatttaagcaagaaagtcaggaaatacacacagctgagaaaaatctcggttatctaggtggtaacctgattcagaaaataaaatctctgagcaatgcagtgaacaatcaagccgatgttgcagaaaaaggagatctgtgaaaagacagcgaggggaaatggattaatgaagtgaatgttttgagggagttgtcccagtgggcacagcactcactggccaagcctgaggactccgtttagatgacttcacacccatgtcaagactgggagtgatgctgtgcacctgtaaccccagtgctgcggaggtggagacaagcagatcacagggactcagcagcttccccgtgtggcttaatcaatattgtgctccgtgttcagggaatggctctgtgatggctattcttggttgtcaacttaactata

SEQ ID NO: 1307 - DNA, 262 bp, Homo sapiens
  misc_feature (1)...(262): n = A,T,C or G
tgctgctggacacccgtgacatcctactattctgaaaccntgaagcataactcagagangatagaaacaaanttgngtnntatgntacattgccagggtcaaaactntatcnaatgataatggcntgtagttccctcttncatgtgncanaagccatgttaaatcaacaagctgtttncattcaatatttatactgnnctatnangngcatacaatgggggatacaatgntcatacaatcctgtaactgggttaacatgttg

SEQ ID NO: 1308 - DNA, 115 bp, Homo sapiens
  misc_feature (1)...(115): n = A,T,C or G
gaggatcggaacgtcaattaacgtcaattaacatctgacactgcccccccccccaaactnagggtnttnngnaaaactagatgggctnatnttagccttgcaggcagttctttgt

SEQ ID NO: 1309 - DNA, 102 bp, Homo sapiens
  misc_feature (1)...(102): n = A,T,C or G
ttttgaggagctcaccgtccgcttntgnaantggagctgttcctataataaagcctttgatgcctccacacctacctcttcagctgtacttaaaaaaaaaaa

SEQ ID NO: 1310 - DNA, 190 bp, Homo sapiens
tgaggtgccccagaggacagaagaggataacagatctcttgcagccactggatgtgagtctgaatactgttctcctggcaagaacagtaagtacttttaactgttaaggcatctttccagattgggtacttatttgttttaaaactttatttattttatatatatactgacacacataaaatacatacac

SEQ ID NO: 1311 - DNA, 174 bp, Homo sapiens
  misc_feature (1)...(174): n = A,T,C or G
ctctttctacacaggnngaggcaagaccacaaagaancatgatcgacnangaatttatacncancangagaatanccgactttgccattatntacagnanttnagaagacattggctaanagcaggtctcaggctcattggtgggtggatnntaatcacaagcatttaataaca

SEQ ID NO: 1312 - DNA, 342 bp, Homo sapiens
tgagactgagacttttcaccaagcgaccctgccttctctaatttgattttctggatcccagactttcatcttctgaatcgctgcttatcccgggtaccggggtgatcagctccccaacaattgtttggttgattgtggctcaagatttaaattttcgtctcaaagaagaatttaaatctcttaattctccaaaactcacctaccctccacccactgggcacctccctccctccctggcttccccgcctgcctgccccggtgcataaggtcttcttgcctttgacatcactcaactctttgaataaaagaggttggaattttgttaccagcgaaaaaaaaaaa

SEQ ID NO: 1313 - DNA, 188 bp, Homo sapiens
  misc_feature (1)...(188): n = A,T,C or G
aagagaatgatatacacagcgtggantntttaccggncaannttataacaaaactgctgccgtctgcanaaagatggcgtcagtttttgccctcatcaagagatggcgagggacagagctttgatnatggggtgcttntaaattactgagttaaaaangactgtgtgaaaaagccccaaaaaaaaaaa

SEQ ID NO: 1314 - DNA, 142 bp, Homo sapiens
  misc_feature (1)...(142): n = A,T,C or G
aagaggaagaggaggaggaggaggannaaaanctgcactntttttnncannnctgnnaaggcggaggcggaaggancctgagttcaaggcgcacgctttaggcgtacactaaaaagttatgancttatctttgggttacagg

SEQ ID NO: 1315 - DNA, 251 bp, Homo sapiens
  misc_feature (1)...(251): n = A,T,C or G
ctccctaccaaggacagacagacacccgagtgaggcttgctggnctgattgnacgcacattaagaaganatnntggggncccccacaggttcncacccangntctcctcgntcatccacacaccannctgctccttcctctcctccnctggtgngatcantgcacncttcntctgatgcnctgcngganaaactccngtgagactacnancgtgttcnccccccccttntatggcacactgaaacacaccc

SEQ ID NO: 1316 - DNA, 114 bp, Homo sapiens
  misc_feature (1)...(114): n = A,T,C or G
catccatgctcctcaaagaagaaccaccagntntantgtcnnctttatctttnaatgctncgccnnatgaagcggctgtattaagaagnggattaggaggtattaagtgtgaaa

SEQ ID NO: 1317 - DNA, 134 bp, Homo sapiens
  misc_feature (1)...(134): n = A,T,C or G
gccgtcccgtctgtgncagcatcgttngaagatcccggtgtactangatgctataatccattttgaanaagctgngnggaagatgttcttnnggcatgntggnaacttnaacataggggggcctgctgcagaat

SEQ ID NO: 1318 - DNA, 109 bp, Homo sapiens
  misc_feature (1)...(109): n = A,T,C or G
tggtgagatgactcatcaggtnngagcacctgantgctgcttcntgaaggagggagtncaaatcccagcaaccaccatggggggtcacaaccaccatatatctgaagcc

SEQ ID NO: 1319 - DNA, 187 bp, Homo sapiens
  misc_feature (1)...(187): n = A,T,C or G
ctaagaactatgcatatcatntntgtggaagggaaatgaanggactggcannaacagaccttcctgctgctggtgtngncagacatggtgatngccncagttaaaannggcncaccacaactgaggaaggaggnncactccagcagntggtancttcgacancgagaagtcatatcagaagaaaaga

SEQ ID NO: 1320 - DNA, 396 bp, Homo sapiens
  misc_feature (1)...(396): n = A,T,C or G
actgaggctgctgccagcctggnanggcgccccantcctgccccatccttgctacaagnncacgnccggaagaagntggccttgctttagnaggtgctnangaattgaancatcangtcctggaccggcctcaaacaggccanntctagactgcctggcgtnggaggtgccaattgaaggccagnggngnctccctgaggaaatggacnttgnttccagcactcctgggagtgntccggcatntgatgggaagaggcacaagaaacatagagcatgtggcagtatttcagaagggaaangcatgggttcaaatcctacttccaccgatnagggatcttctgcttatctttctctgcttcaccttccctgaccataaaatacagggctaacactata

SEQ ID NO: 1321 - DNA, 300 bp, Homo sapiens
  misc_feature (1)...(300): n = A,T,C or G
ttgggggccaaaccgcgcggaagggaggaccgagcgccgggacatgttctggaanccnaaggagcccggagccagaagagactggatagcacccnagagaccancaggccgnggggcggaaccncccaccaaagagangcagaaagggagacgccananccggagagagagagangacntcaaccgngaaaagnacgngaccgnncctnccagaggcncggcgggnaaanccgcagagangncacagggggggcacacaatgancggcaanggggaccgcgacgccctcccccaggagag

SEQ ID NO: 1322 - DNA, 350 bp, Homo sapiens
  misc_feature (1)...(350): n = A,T,C or G
ggaaccctgcactccggaggggttctggttggaccggtgcaggatttagcactgagaagcaaggcttttcacacctgatctacagttaccatatgatccagccattctactcagcaggaactttaacaggtgttcgtattcatggaggccgcacntgcagagctaaaaggtggatgcaacctaaaagtccgaatctgacggttatgaccgtccgctttctcccggcatcccgcaaggcaagtgcagtttcctgttgcattccgggattgcgatgtagcaaggctaaanggaatcttccagtgtanaggtggagatggtgactggggaagtgaaaagtggaaaaaaaataa

SEQ ID NO: 1323 - DNA, 101 bp, Homo sapiens
  misc_feature (1)...(101): n = A,T,C or G
ttagctcatatgtggaagagagctgctgatctttagacacnancgatgatcactggctnacctactaccatatgggaccaatgtgcctggggtgacttcaa

SEQ ID NO: 1324 - DNA, 149 bp, Homo sapiens
ccccggcccctccattgccgttgaagttgaagctcctccagtagcctacaccaaaggaaaggttagttccagaaccggccaaagttcctgaaattaagccagcgatacctctccctggacctgaaccaaagccaaagcctgagccaggt

SEQ ID NO: 1325 - DNA, 304 bp, Homo sapiens
  misc_feature (1)...(304): n = A,T,C or G
aagggaactactcaggggacccacagntgagcagtgactctggaacactccatcctaaatggtggctgtcttcatcgacatcttcagagacaacaggaaccacgcacatcagagacgggcagcacaggcccaagcaagatggggtctcagcaccgaggaggaactgaacacagcctccctgcccacccaaacacaggctttccagctgatccacactcccatgtgaaggtttgttttctccagtggagtctccccaggccccgcagcatgtggtcaatacaaaangtactcggtaaaaaaaaaa

SEQ ID NO: 1326 - DNA, 255 bp, Homo sapiens
  misc_feature (1)...(255): n = A,T,C or G
cttgccaaagcagttncagtgagcnagagactgttagaaggngaanatngggngntcanaactnctgctgtaaaaactggattctgagnttccgctgntttanaacagaacagggcatcggccctggccctgcgatcgcttgcagaggaagctttgacttggccatggctgcgagcctgctatcttatccgctgagaagcgtgcctcacttgtctaatggtatcagtataagccatcaaaaacaccagaatgctg

SEQ ID NO: 1327 - DNA, 218 bp, Homo sapiens
  misc_feature (1)...(218): n = A,T,C or G
ccgggaggctagacagantcatatcagnattaatggaatggnngtncanattcgagaggaggcagtaggncatntctgagccaggaggagancncataacatnatncttgcntggcaggtccnncctgagaagccacnntngcancgcaggtggagagacagtcgacagagtatgactggctagntgacttttggtatntagagaccgaaggggacct

SEQ ID NO: 1328 - DNA, 261 bp, Homo sapiens
gactgaggtgaagaactgcagccaatgaactcaccctgctggactcaccctgctggatggtgacccaggagcctgcatctcaagtcccaggccagtaccctatcacttcacctctctggctgctgctgtagagcaccaaccctcactgcgatggctccagaggttcttcttggcttttgctagcacagagtctggaagagaatgaataggtggttcctctgatggcctttgtgaaggttattaaacagaatatacacaaaa

SEQ ID NO: 1329 - DNA, 122 bp, Homo sapiens
  misc_feature (1)...(122): n = A,T,C or G
acagcaatgtgcccaccaagcccactgcagncaacatnttggnaanggngngagacanctctcaggcggatctgctgcgtccacccaccaggggtacgcttcncttttgttagatggccaac

SEQ ID NO: 1330 - DNA, 232 bp, Homo sapiens
  misc_feature (1)...(232): n = A,T,C or G
ggattttgtgtgctatatttgacctacanagaagaatatgcccactggngcaatantggccatgagtgtttggtgtcggtggngtaaccaactgctttcacnttcaatnngcagnctgnnctcantgaaagagaatncatgctnagtactgtanacatgatacaaangccgtngnttgggaggtnacaggctctagctgtattacatgatgnctctattaaatggatatgtc

SEQ ID NO: 1331 - DNA, 321 bp, Homo sapiens
  misc_feature (1)...(321): n = A,T,C or G
ggcttcccacacctacttaatggatggtagaaacattcttcggacacaccagaggaccctctgatgagatgcagcaggaaaaccgtaccaatggtctgtcacctgctccttggcactcctccagcaaacaccaatggaacagccatctttcanaagtcggcaccctccaaaagaggcaaagcangcctggggtttaaaaaggctgaagagacttaacaaaatgtccagggtcatcaccgccagaaggaaagaaattactgcacgtgatgtttttaaaaccaactgacaaaatatgaatgcacactgtctataaaaaaaaaa

SEQ ID NO: 1332 - DNA, 187 bp, Homo sapiens
  misc_feature (1)...(187): n = A,T,C or G
ggagtttggcaatgaagattacaccatcagaaattcatctnttgtcaatntgaacccaacataccacgttataaatcataacatntccctctggacttcatatccatctcataangnaaaatggataaacaccccaggagtctttgctcaaaacacccaagccgcatctgagtactagacatactct

SEQ ID NO: 1333 - DNA, 111 bp, Homo sapiens
  misc_feature (1)...(111): n = A,T,C or G
cagtcattcaacaaagcntntgcatgccagaagacccaaaaganacanagctggccngancntggaccaaaacttccaaaaccacnggagccaccaaagagcattcccctt

SEQ ID NO: 1334 - DNA, 131 bp, Homo sapiens
  misc_feature (1)...(131): n = A,T,C or G
gaggacctgaatatttaaatctgagnttcccgtatgcaaatgaggcggggcggggcttggaagccggaactcagcgtcaggctcatgggctgggaccggaaataaaggctggagttttgtaaaaaaaaaaa

SEQ ID NO: 1335 - DNA, 154 bp, Homo sapiens
  misc_feature (1)...(154): n = A,T,C or G
aaccaatcacaaattgctgcggacagnccctgtcatggngngangctgnngacagnancaaancacagcactgcaatgacacaggaggcatgatgggatgaaccctttnccactctgactgaangctgnaaagccgcccaccctacttataaca

SEQ ID NO: 1336 - DNA, 161 bp, Homo sapiens
  misc_feature (1)...(161): n = A,T,C or G
ccagggcgacggccaggacaaagagcaagacngagggcagggggggggacaaaccagaccccaccagcancagngggagganggagggganaggnggaggcnngcggcagggaccanggcacggntntttttaggggggggcccagccacaggcagggccc

SEQ ID NO: 1337 - DNA, 483 bp, Homo sapiens
ctggcaaacctaagagttcaaggcactggaaaaaatgtctttcttcacagtgagccccacacagtatttacgtgtttgctagatgggcagatgaccctctaacttgaccttcgagactgaagcgccagtgacagtttttatcctgtttcaacaagactgaattccccttgactcactgaacacgtatatctcgaaagcgaaggaagagccttttgatatgtgtgcatgcacaccttgaagaagggcttatgtcagctggcaagaaaacggtcttccctcctcaaggaaacagacgcgagaaaccagacttcggcagggggttcagattccattcgtttactcattacatatttatcaagttggatattgtctctgtgctcacagccaaatccccattgacaagcctccgtgcaggactttccaggttcccttttgtttcttctgccccaatattaaaagatgaaggtttcaaactaaaaaaaa

SEQ ID NO: 1338 - DNA, 143 bp, Homo sapiens
  misc_feature (1)...(143): n = A,T,C or G
tggtaagagagcaatgaccntcantacctatcttgcatnatngngtgctntctnaaacatntgatgatggaggaacttctcccttagaggacnacttggggnggnccnccatgaaggccangcaggagagtgcacagacactt

SEQ ID NO: 1339 - DNA, 102 bp, Homo sapiens
actgagctcaggtaactgacaacctcttctgataaaactgcacacctgcattcatgtcaaagtaatggaaataaatttaaaaactaaacccaaaaaaaaaaa

SEQ ID NO: 1340 - DNA, 158 bp, Homo sapiens
  misc_feature (1)...(158): n = A,T,C or G
agtggagatggacggagacnagangaccttggttcatctggnggtacancaaggagaagcgtnatcctgcctnacgtggatgttcagctnangcnnttgngaccttgggcntccaaaccgagaccagaccaatgaccaggncaccatacgactctgct

SEQ ID NO: 1341 - DNA, 237 bp, Homo sapiens
  misc_feature (1)...(237): n = A,T,C or G
atgaccagaatagccacgtgaacaacgctgngtactacagctacattngacactgtaatcagccacctacctgatcaggtaggnatgaatntcacgctgcccttgctgngtgnncttgatggggactnanagcanancngtnctctgctacctatctcatntgnggngcagnctggatattgggctcttcnnaggagaacagaaggtcggacatttgggngagaatgtatggctctg

SEQ ID NO: 1342 - DNA, 276 bp, Homo sapiens
  misc_feature (1)...(276): n = A,T,C or G
tacaagtgtggagggcagaggacanctcttgnaatcnctnntatcctatcangtcggncnnaggcatgaaacatgggccagctcctcanacttggcagcgcttnactnnaanagccancttacgtgctcaaaaaagggttcatnntatgaggaccgtgtagcctggcttgtactagaatttgctgtgcagaccaacctggccttgaactcataaacatttacctgcctctgcctntagagtgttgggattaaaagcatttcccactaaaaaaaaaa

SEQ ID NO: 1343 - DNA, 183 bp, Homo sapiens
  misc_feature (1)...(183): n = A,T,C or G
agagcgcgaacacgccttgatgcacactcagatntgtnagncagaganactggtagcctgaccntgggaanacgcnacctaggttcttatactacccgggcacantggcanagntgagcaccattggacantgagtantaacaggcgaacccgtcgcatgcncntctcgctatagagcaatct

SEQ ID NO: 1344 - DNA, 263 bp, Homo sapiens
  misc_feature (1)...(263): n = A,T,C or G
gcaactcatggaggttcacctgcccatttccnctgngtgctganactacanatatgaaacactgtntctgnnnaggactatctttattccttnatacntcttcaaggtntgaagccacacntaccaccgttacacgcatatgagatgaagatgaatacccctagtggnctncagggacggtgagggtggagtaagcatatgtnancggnntgcattaccatggatggacttgttgatnctgaacatgagttccacctccaacc

SEQ ID NO: 1345 - DNA, 511 bp, Homo sapiens
  misc_feature (1)...(511): n = A,T,C or G
aatcctttctagacttngntcacaggcagcactctgctgacctgccctcnnggacctancaattgnttaaggcatcacctgccccgccccccacgtactgacaggtnggnncnanangaantgnganntnctttanngnntgagcacacagaaggcacttaaatacagtgcntggnggggncncacgtgnggccagtgataacnanggggccacncgtgcgggccagtgataacaacngtgacaantcggaagctgttacattagcaccatgcntgnntaccaggtgctnaacacccagccatcccgtgaagcagcnggngttganccaattttcaagagaagganagcctttgaattgatcatnttctccgagctnantgcctagctgcnattgctcctctctaaatttccaccgtctttatcagtacctgcctgggacgcacacngagggaagaggcagancgngtccccgctaggcctnttcagcgggcttgtggcaccgagtccttg

SEQ ID NO: 1346 - DNA, 443 bp, Homo sapiens
  misc_feature (1)...(443): n = A,T,C or G
gactgaggatgaagaaaacaagcatggtattccaatggtggcgttcaagaacaagaaagcctttggatgcagtggacttcgactctttcttttactaaagtcaatataaataactcttaaatcataaaaaccaagtcattttgagaaaagnacagaatganctggcctgactccncctacacctgctnttccagcgtnttctagncanggaggcgccctgcnacatgagngtnccccactcantnctccccgtccnctagggnnctccttcaccacctgctcaagntgtcttttccttctngncccttcccancatncttcaaggccctccntccagtggccctcctctttccagtggcccctattttggctatgccttgccagtttctacctcggtgtcacaggctcatcctgcctatggaatacctaataaaagtagctta

SEQ ID NO: 1347 - DNA, 361 bp, Homo sapiens
  misc_feature (1)...(361): n = A,T,C or G
ggtctgttttcctgaacccatcccagctgggagattaatcaaccacactgaaaatgggggtgtgggggagggaaaggaagagttggaacgtagatgtttgaaacaaatgtgtataaataaatgaatttttgataactccnntattgacctaaaaactaacagcttggtaagggaactccattccactccactcgtcctagaactggaantttttgtaggcacttttcctctccacactcaaaagcttgggctagggccaactcaggctgcccaagcccatttctattactaatgtaactctatggcctgagtctcaacactgaaaaccaaattcattcccttaggggggaaaaatccaaaa

SEQ ID NO: 1348 - DNA, 560 bp, Homo sapiens
actgagactgcatttgttgttgatgaagtgagcagcattgtaaaggaggctatagaaagcgccatcggtggtaatgcctaccagcacagcaaagtcaaccagtggaccactaatgtcctagaacagactttgagccaactcaccaaactggggagaccatttaaatacattgtgacctgtgtgatcatgcagaagaacggtgctgggttacactccgcaagttcctgcttctgggacagctccacagacggaagctgcacagtccgatgggagaacaagaccatgtactgcatcgtcagtaccttcggactgtccatctgaccaccttgccagcctcagcctcgtggtcccagcatttccagtccatcttaaccaccagctatgttgggcaaaccccttcctcctaagttgttctgtggcactctcaaaaaaccaaatgactccccagtcacaggaaccacatgacttcagccagattagcagccacctgtcatctgagccaggcagtaccacttgtcttaactgtcttctccaaggtgctaaaaactcaagtcaaggga

SEQ ID NO: 1349 - DNA, 820 bp, Homo sapiens
  misc_feature (1)...(820): n = A,T,C or G
gactgaggtttcccttgagtggcacagtgacagaacctgcaatacaaccggagccagaaaccgtttgcaacgtggccatcagctttgatcgttgcaagattacctcagtgacctgcagctgtggaaacaaggacatattttattgtgcccatgttgtggcactgtctttataccgcatccgcaagccagagcaggtcaaactgcatcttcccatttcagagactctctttcagatgaacagagaccagctacaaaagtttgttcagtatttgatcacagtgcaccacacagaagtcttgccaactgcacagaagctagcagatgaaattctctcccagaattcagaaatcaaccaagttcatggtgctcctgatcctacggcgggtgctagtattgacgatgagaactgctggcacttggatgaagagcaggtgcaagaacaggtgaaagtgttcctctcccagggagggtaccacgggtcaggaaagcagctcaacatgctctttgcaaaggtaagcacgctactgagacaaaaagaagacagaagtgtacctgccttcggttgctcagatcgccagatccggtaccagagaggcttgagttgtcatgaatgaaagaagactttgctcantgcaagtccctttagacagaagctntgggttctcangcactccttggaaggaaggtgacaggaactcaccgaaaagtcngcnnatttatttgcttgggcaccgtgaaagtccaaaggccntcacttnagtagggacgggatttattgcctcaaaagaagcttaaggctggatgggatcttgcaagtttt

SEQ ID NO: 1350 - DNA, 650 bp, Homo sapiens
  misc_feature (1)...(650): n = A,T,C or G
agcgtcacaacaaataggaaaccatnaccgnnagccacagactggtacncagtgcangagatgaacagcattgtggggagcccggctccaacagataaatctacatcacgactcctgcgtccattgctgagggacatctcataagagagggatgaaaagctaataagcagtcaggttaccaggcaagtctgctatgaaagnctgtcacagaaatggctgcgcaaacaacatgtaagccatagcaacataatagactancacacaaaaagggggacatcccgcagggtcacacccctggtcaaggagctacagacancaganagagagaggactgcggngagaggaggagttactannctgatgggtgagccccctaattggctaatccaatacaaagagagccttcaagccatacacacacatangactaaacgagctcagcaggntgaagacatctcatttttgcttacgtatncntagctactcgtgtaacagtaattntnagggaagatgatttgagagtggtgggaagacngacatggcaggagctggacnaaaagactggnanaggggatggaggaagggaangggaaagaaaaagcnctcttnttangattttaattttaaaagngaatgagcttttaatccca

SEQ ID NO: 1351 - DNA, 547 bp, Homo sapiens
  misc_feature (1)...(547): n = A,T,C or G
gactgagggaaaatttccctttatgaagcagatttaaacaatcaacttgntcaggccggntctccattgcctgtctcatcggactcatcaccactatatgctgtgccttaggcttagatccggctggaaaacaccacatgacttttcattggcagatgtgctacctgaacacctgaacagttcctaccagaacctctgctgtgagcaatccgaaagctggccaatctcctccaggctggccaggatccagcccttagagtaactcangagttccacctgctgtgttatctggactcccactaagtgcagcactgtgccttcggagcagcaccaacaagaatgtatcccttcatccctccagctagactactaccaggatctccagcaccctttcttccttctggaccatcgtgtccccaacccagtggtccatatccaggccctgctgtacgagtccctggccccacaaggtcatatgtttcaacaaatgtgccctttccagagctacctaggccaaatagcgcacccncagatccagttggaggat

SEQ ID NO: 1352 - DNA, 188 bp, Homo sapiens
  misc_feature (1)...(188): n = A,T,C or G
cacgtcactgaggaaaagagtttcaaggaaacgtcacctcctggagctttggcgttctcattnacccatatactcataccctatccccgtgttagtctggtgtatggaactatgagctcttttttantattttattataaangccttttaagattaaaanatgatanagtggacttgggtaagggctt

SEQ ID NO: 1353 - DNA, 124 bp, Homo sapiens
gtgcaccctcgggccacacttctgtctgatggcagcagcccagctccttccaggaatgtcggcatgaccatctctcagaaagggggtctccagccaacaccgagcccagctggaaaaaaaaaaa

SEQ ID NO: 1354 - DNA, 464 bp, Homo sapiens
  misc_feature (1)...(464): n = A,T,C or G
actgaggtagcacttactgnctgcttgcncntgaatacaggaagacgaacnaggagcatgaccanccaacctatcagcagctgtcantngccantagcccttcagctaggagtggagcattgagagcgcctccctcatccatgctggaacattgactcgtcttgtgttgtgagttcctgagtgccanagccatcatgtttggcagacagtgtcccgtattaccaacagtcttgctaagatgtacctgcttgcgcaatagcggcatgatggctatgggtgcaaccacacactttctgattggacctaaggttcatactacaagaaggagcccatatttggtactttaaggtaaggcaagaactctgtggctagaaaagtcatagacctggtggggaaatatgttgttttgctcgatggctatgatgtgcctgtcagattgccttataaatatttgtttatggcca

SEQ ID NO: 1355 - DNA, 374 bp, Homo sapiens
  misc_feature (1)...(374): n = A,T,C or G
cacctgctgcacaganctgctgtcaacggactcntcttaantncgccatgagaacnttctacacgatcactntgaagnacgtcnttcangcaacntngagctttggctgaaatcttttccanctaagacttccattntganannaaattaagagactgggatctggagagagcctnaaangctaagagcacttgcnctgtggcanaggacctggtttaggantcccagnnctcactcacggngcaagctgacaactntttgtaactctcgtnccaggggacacaatgccctcttgtggcactntacgggcatnaggcttaataccgatgcacatacatgcctgtgagcanacactcatactcataaagtaacat

SEQ ID NO: 1356 - DNA, 368 bp, Homo sapiens
  misc_feature (1)...(368): n = A,T,C or G
cggctggctgaatggagggaccctnttgtttttgcctcccaagcactagaattgaaggaatgtgccaccacacccagctactttctgtgtctcccagctgggtgggctgacaggattgcgacagacacacggggtttacacctgcccttggacaaggttcctgttgtccagcgatagcgcccttcctgtggagtccttatctagggaagaaaacgccnccatgcgaccttgggctttgggatacctgtgccctcctggtttcagnggctgtatacagtgtctgatttattgcggcgaatcanngcgcatcanagtgcttttgaggctgcgctgattggaggagngcttgctcgcctaatgcagagcgt

SEQ ID NO: 1357 - DNA, 274 bp, Homo sapiens
  misc_feature (1)...(274): n = A,T,C or G
tcggaacacaactattctgctcaccagctgtgtagctngtacgcatngacacccaagtgccctgcgccttnnanttggaaagctgangcaggattgngagtnctaagccagcttggcttacacagagcccagacccttcatcccatggncctcccaagtctgncnctctcatggactctgtgaggngcgnattgaaggccctggaagaacttaacaggnnctgntnagatggctcagagagtaagagcaccccgactgctcttcctgaaggtcc

SEQ ID NO: 1358 - DNA, 148 bp, Homo sapiens
ctgtgggtcctcctacccacagctggatctctgctgcgccttcctactctactggcttgcttggtcttccctccccggtcaggggcgtcatgtgatctgatgagatagtgtatgtgaaagcctttgtcaactgtaaggcacagccgaa

SEQ ID NO: 1359 - DNA, 365 bp, Homo sapiens
  misc_feature (1)...(365): n = A,T,C or G
gggggacaattagaagaagaggaccgaatggaaggagacaagtgaaggtggtatggactggtgaatatcatcaaaacacatggtatncctatatgaanatggcatnntanaattanatgancattncctttgacattctgcctgccttctgtntantcactgaaaccccagaggtaattttcaccaggaaatcannactgcactgnanaacctcanaaaaggaagcntacataagaacacctgtagctggagagatggatcagcggttngagcactcactgttcttctgaaagtctgangtcnatncaccagcanccncntggtgctcacagccatccgtatgagaccggataccctccttctgg

SEQ ID NO: 1360 - DNA, 236 bp, Homo sapiens
  misc_feature (1)...(236): n = A,T,C or G
gagctgctgagctgtctgtanagatgaaacctgttcttgcctgcataattgcctggngatagcggcacaacctgtggtacttggcgacctcaatgctatacagctntgcacagaactactgctaacaacttancaacaaagcatcacagaagcctggggtggcaggggcatgggcctnccccctttatnanancagactnttagtaaactttgggccatgattggaaaaaaaaaaa

SEQ ID NO: 1361 - DNA, 263 bp, Homo sapiens
tgagacccctgctctgaaagcttctgatgcctgccaagaagaattcttcaagttggaagtgcctgcccccaatcattccaccgaaaagccagagccctcaaggtcacctatcagtgcctggatctactgagcctttggggttacatattatatccacatcatagttatactgtgtgttttgtaaacaggtgtcaggtaagctctcccttcaccaaggaaaagaggaggagagatgggggagaggctgtatgagaggggctgcg

SEQ ID NO: 1362 - DNA, 208 bp, Homo sapiens
  misc_feature (1)...(208): n = A,T,C or G
agactgaggagcaccngganaactagcaanaaaaagcaccnggagcngaaacaatgggncanatactttaacaacctgctgactgctgactgccacataggcttctgtaagatctacactgttcactccacactgtgggtttagaccagagtttctcaagcttcacaatgcatgagaccctttaatacagttcttcatgctgtgctga

SEQ ID NO: 1363 - DNA, 269 bp, Homo sapiens
  misc_feature (1)...(269): n = A,T,C or G
gactgaggacccaatcanaggcancccanccatctggaatctgnaagaagctgnntctagcactcngaaggcagaggaaggcggatatatgagttcgaggccagcctggtctacagagcaagtttcangacagccagggctaacacagagaaaccctatcttgaaaaacaaccaaaaggggaaaaaaatcaatctggaagaaaagctggccttattagggctaatagtgtgggatttaaatatatacaaccatggccttgctcaaaaaa

SEQ ID NO: 1364 - DNA, 285 bp, Homo sapiens
  misc_feature (1)...(285): n = A,T,C or G
ctccgtcagggcctgacccaagccttngangagatcatctctgcaggaggagacgaaagtcactgtctcgctgctttccagaagcgctccaacacttgttcctcattgtctcatgagatgtgataaattggggcacactttcctgcttggctatgggtcggagtttcgcagatggaccgcctaaggactcagagtttctgggtgctggagagggctgcccaggatatcagtggttctggaacatttccaggttccccacaattctccaacttcggtgtactttaa

SEQ ID NO: 1365 - DNA, 401 bp, Homo sapiens
  misc_feature (1)...(401): n = A,T,C or G
actgaggtgttatctacacaccacagntatgcaatacctagaagtagganactgatcgcntgnaactaggaagacacntgcaacagnttngctnanngtaannttacgttnggnctangggacccntngggctgagctatacctggantccttggtggtgatgacanacgacagctgattggttgttagccaggaccactcttntccttgtgctgnttctcctccaaactgcaacttaatgcacctgcaatgaaaatggccccacaccagataaccagatgcttgcagtgagccgctttattttgctattacaactgggcanataagacaattttaagccaggtggtggtgatatatgtctttgattctagcactcaggaggcanaggcaggtggatctat

SEQ ID NO: 1366 - DNA, 504 bp, Homo sapiens
  misc_feature (1)...(504): n = A,T,C or G
actgagcgtttctctgtgcagccttggctgtcctggactcactctgtncaccaggctggcctccaactcagaaatncgcctgcctctgcctcccgagtgctgggattaaaggcgtccgtcaccaccgcccggcttgaaatgacagttcttttacaagaccaagaatgttgnaacnttcagcagaacaggaaagtcatcatcagaaaacaccgacggaaangnacaggaatnatnaccgnagggganncacaaatacnngtggnanagtacnggggngactntganggccntngctacangcaagagatnangtntccnattncngnctcagaagttgctggcatcaacacagttcacactactatatncttaggaaatgaagatttcttacaaacgcaggggaaacagcaatactngtagaanagcaagtgngtgtatagaaggatgaaggcaactgagngaaaataaaanttgngacctgtgagtnatgtataaaaaaacaca

SEQ ID NO: 1367 - DNA, 109 bp, Homo sapiens
  misc_feature (1)...(109): n = A,T,C or G
actgagacaggcagcatgttgtcctntgtagaagctcccccagcanctgactcagacagatacagacacccacagtggatggaacttggagactcttatggaagaataa

SEQ ID NO: 1368 - DNA, 208 bp, Homo sapiens
  misc_feature (1)...(208): n = A,T,C or G
taagtaccttctctggggaaggntcgtaggttgntttaccgncatnaaagcctagttctttgggagtccaccatgtactgaagacatccaagcacgtggacctgtactggactgttggacttcctgcttacagccagtcattgttggatttgctgggttgcagcctgtaaatcattctaataaatcctgcttacctgcaaaaaaaaaa

SEQ ID NO: 1369 - DNA, 388 bp, Homo sapiens
  misc_feature (1)...(388): n = A,T,C or G
aagagacacacaggaccnatagcgagcctggtatnatcataaacatactcattggggccagacttacagttcanaggnttggtccattattatcgtggtaggaagcatgncngtgntcangccagacccnnagcttgtangaagaagcgtgagagttcgncagctntgatccacaggcagnaggaatagaacttgancctctgaaacctcatagcccacccactagtgacgcacgttctccaacaaaaccactctgctccaacaaggccacacccaccantcaagccttcaacattggaatccatgggggcggctgtcactcaaaccactgnagcccctggttatcagatgatgtaatcagctgcatgagctgtattttaaatgggtg

SEQ ID NO: 1370 - DNA, 380 bp, Homo sapiens
  misc_feature (1)...(380): n = A,T,C or G
tgcgggatggcagcctgctctgccttggcgctgtccagtgataacagctttttggttgagaagctctttctatcaagtggtaancctataaaacatgtantgcaagcccgaaggcctctgntcctgangntncctnanggnccagnaagangccgagggatganctggacctattaccacacntnttnncccaggagttngtcacatttcctncnccaggtccacctatagtttaagatncaanncaacattgtntnngtcctgtgtggagcnnanggaacancaagaggccgngtgaagnacnggcacctcttaccacacatgttgaccccagtngttngtcanataaantacaangatgtccaattaagttaaagttt

SEQ ID NO: 1371 - DNA, 509 bp, Homo sapiens
actgagatcggatagtttgagtttcaagccgtgctggaattaaaagaatgacgttacaccgcgcccagactgcgtctactccaagctcaattgagatagacggcgtgaaaagagagcaccttggatttcctcgtctttctcgtggagaaccatcactaacccacagattccaccacgagagtagtttatgcgtagcgtcgttaaacgtagctattccgtcctcctcaaggcacttgggctatttcggggtgtctcgctcatcacctccccctccatgtccgttttcttcgggctaaggtgcctgcaaatccaacaaaatgacctggccgactgaccttgaaactgcgataattttcgttatccactgcacgtacacacagcgctgtgttgaaacctggagtgccccctaacttaaggagtgcagattattgagtgatgcataattaatttcttgaaccatatatgagctgaggtatcctcgtacctaatatactctgaaatccaaagaa

SEQ ID NO: 1372 - DNA, 302 bp, Homo sapiens
  misc_feature (1)...(302): n = A,T,C or G
tcagagggtcattatcaccatggcagtaggcatagcagacatggtgctgnaggagctgaaagctacaccctgacgggcagtcagtttgcagcttattggatgcacatgccatacagtttttttttgacaacttgacacagccagggccatctgggattaggaccctcctcagcntcagaagacaccttaatcagcctggcctatgggtaaacgtatggaacagtttcttggntgatgatggatgtgaacactgtgggcaatgccacccntgggaaggngggactgggttgtaaaagaaaaca

SEQ ID NO: 1373 - DNA, 472 bp, Homo sapiens
  misc_feature (1)...(472): n = A,T,C or G
gactgagattgaatgcttttcctgcatggntgtctgtgcaccacacctacgcacgcctggtgcctgactctgtagccaagactggaactctccactacaccttggagttcctccggagtctctcatttcaaagcagcagggctgatggccagagatgttaatggaggtgtggtgcctgcaccctaactaccaacccccaacaggttctaaagccagcgtcaggcagacaagccaccgtccagaactgctgggaggagatgtagtctcccctcccccagcctgaaacctgcttgctcggggtggagcttcctgctcattcgttctgccacgcccactgctggaacctgaggagccacacacgtgcacctttctactggaccagagattattcggcgggaatcgggtcccctcccccttccttcataactggtgtcacaacaataaaatttgagccttgatcagaaaaaaaaaa

SEQ ID NO: 1374 - DNA, 508 bp, Homo sapiens
  misc_feature (1)...(508): n = A,T,C or G
gactgaggtgatcagcctctgcagngactgcncgggccccagaggtaggatggcctnctgttgngcccagcncacagtacttctgttgctatgaataggttccaattgtatgaggatcacaggaaaaaattagcgtgaacagtacctggaagtggaancactggntgggtgtggtggccgcatgaggcanggagaatatcatgagtctgagacagcctgggctacaaagtaagatgcatcttttaaaagcaggtgctgggactaagagtgcttgtagcttagttggtagagagcttgtggctcagtgggtagacaaaggccataagctggacctagnggcatccacctgtcaccaggacacagctacaggagaccctgaatcaaaaaatnagnctaacaaacaaacanacaaaacccagaatgccgggcacatggtaggaagcacacacctttgattccagccacttagtaggcagagccaggaggagctctgtgagttctgggctag

SEQ ID NO: 1375 - DNA, 228 bp, Homo sapiens
  misc_feature (1)...(228): n = A,T,C or G
gactgagcgctgaagagcagacccagtncttnatgcatgctangaaaatggatgaccactgacctatatcctcagtcctccactatctcttcatacgacnactgnacgtaatttatgncatgatctgggtagcaantatgctggctgactacatgnaaaagattcacatagntgtatgtaagactggattaaattgttagacctcaatacanttaaaaaaaatactga

SEQ ID NO: 1376 - DNA, 233 bp, Homo sapiens
  misc_feature (1)...(233): n = A,T,C or G
tgtgcgagggggttacaatccaacatctctgtctgcggatgtaacacaacccttacaagacggagttcccacactcctatccaagcctgtaaacccagaaggatcacacattcaaggccagtgngggcctacatgagaaaattcaaggccagcctgagcaacatgatgagaccctgtcnaagaacgngaaaactatagagagagctgggggtacagctcagtggtgaagtgtt

SEQ ID NO: 1377 - DNA, 164 bp, Homo sapiens
  misc_feature (1)...(164): n = A,T,C or G
cactgttcgggaccggcatggatgaacgtcatgatggcagnntgatcnacnntcatgactcatatgccaatgaggcctgctcagatggancagttccctttcaattctacttcttcaaggaggacaagagaataaaggaaaactcccattctcaaaaaaaaaaa

SEQ ID NO: 1378 - DNA, 295 bp, Homo sapiens
gaggaactgggaccctgtacatggccagcaggaaggatacactcatgaaatgtttactgaagaaataattcctgtccttgcagcagctgcacctaacaaatcacctcaactcctaagaaagaggcgtggccattctttattactctctataaatcattgtaagttttcccacatttgcccaacttagcacaggtcatagagatcagatttccttcttttttaaaataatctgttcctaaccttaaatgtcctatgaataagaacattattaaaagcaacactcataaaaaaaaaa

SEQ ID NO: 1379 - DNA, 150 bp, Homo sapiens
  misc_feature (1)...(150): n = A,T,C or G
tatgcataacccgttcttttctaaggagnagacggaaagggagtgtggatccggncaggaggcaaagtagggaggaacggggaggaagagagggagaggaaaccaacatcaagatactgcacggagaagagaatctactttcaaatagaa

SEQ ID NO: 1380 - DNA, 168 bp, Homo sapiens
  misc_feature (1)...(168): n = A,T,C or G
cgtgagtctaatggccagcatccacatnatggntcacagtgcattnggaatggaanntgattccctnttgtagcnngcntgangacagaacacattggctggcagtggtggcgcacagcctttaatcccagcacttggaaggcagagaaacaaacaaagaaaagaaaa

SEQ ID NO: 1381 - DNA, 319 bp, Homo sapiens
  misc_feature (1)...(319): n = A,T,C or G
gactgagctccatcctctccctgacagtagcccaggatctcgcggcttccatccttacccactgtatctcaggcgtgccatatcagagatttaacagtnatttctcaaagaattatttccagcccattgcccatctaagagcctatgaatcanccaaaacatgaagttngggcttggagagatggcttcagcagttaagagcatttgctgctattgcngggggtctgagtttgagtcttancacccatgactggcagctcacaacagcctgccactctgactgcatgggggcagggatggggtgggggtgtataacacc

SEQ ID NO: 1382 - DNA, 278 bp, Homo sapiens
acagacaattaagaaaacatttggagaaccaggataggaattcctaggcctggaaccatgaacttgtttgaccctgccagcgagatggggaagttgtccttgagatgactggatgcagacaactgtctccttacacattgtccctgaggtgtctggacgcagacaactgtttacaacagaagctgttcagctattgagaagtccccagctcccctagagcctggaaccttgaatttagtttctccctgtgattaaatggagtctgaaaatgaaaaaaa

SEQ ID NO: 1383 - DNA, 220 bp, Homo sapiens
  misc_feature (1)...(220): n = A,T,C or G
gactgaggtgaggctggcctcgactcngaaagtgcctgcctctgcttcctgaatgctgggattctcctggagaccccaaaatgccacagccatggaacacctgagccaggaagagctgcagacnaggtataaagctggcacaagggaangatgttaccatcaacaanacttgganagactganagatgtggggagctctctaatcagccctttgatatca

SEQ ID NO: 1384 - DNA, 268 bp, Homo sapiens
actgagaggtcctgaagattcagttttgtccacaagagggcgcaggcggctccctaacaatcacagcggcagaccagctgccatgaaatcctgtggaagaggcgagagctccttcagcaacctaactgaagtcacatcagtacatgtgcatttgtccacaacagcacagattcccttggaagcacacataaccttggatatggaaagaagaaactgtgttcatgtttggaacttgtgactgtaatatttattaaaaacatcttgtgaa

SEQ ID NO: 1385 - DNA, 231 bp, Homo sapiens
aaatggctccccaggctgcatgcccttgtcgtgggacctggcctaggtagggatgaccttcttctcaacaatgtcaggggcattttggaatcaaccaaggccagggacatccctgtggtcattgatgcggacggcctgtggctcgttgctcagcagccagccctcatccatagttaccacaaggccattctcacccccaaccacgtggagttcagcagactctgggaagcc

SEQ ID NO: 1386 - DNA, 154 bp, Homo sapiens
  misc_feature (1)...(154): n = A,T,C or G
agctggactgactatgntnntgcacggaagagacgcctgctgcnttgcnaaagaanganccaatnnagagcgntgagcgcagaagnagagngggaagcanaagtaatttgtttcttgaaataaaatcagcttcctttttattgatcttgaaaaa

SEQ ID NO: 1387 - DNA, 292 bp, Homo sapiens
  misc_feature (1)...(292): n = A,T,C or G
actgaggtggggtctttnaagtgattgggagctgagtacgtccccacaaagtcaccggaagtcagagcgatgtgcgttcccttagagatggaagaggaagcgatcgtcctgcttctgcgcatccttggggaagtntgnacttcaaagcaacgtttcacaacagccagccttttccttttagtaggctttcctctttcttggngacccaactcgatcaacccgaaattgttgggttatagttgactctctcaccggctctgtatctgaaattatactggaaggctttcattaa

SEQ ID NO: 1388 - DNA, 183 bp, Homo sapiens
  misc_feature (1)...(183): n = A,T,C or G
gatctgagttctagaagagacaatgnctctgccttttaatccacagtatgaggagctgatgagggtgcaggctgattgatggctggagtccaggatgtgcacagtccctaggaagaagcaaactatagaggaaatgacccccccccccatgcagtttnanattnaaatatggtttttgtctcc

SEQ ID NO: 1389 - DNA, 222 bp, Homo sapiens
tgagttacaccatctgatccaggggtaaagttacaactggaaaaacaaacccatctgcgcccttcagttcttcctctggcacgtctacagttgcggaaggcagtgagcacagatactgttccccagctctgaatggtaataaaaattatcaaattcttttaccttacagttaatgaaatggaaatgagcaatgaactctacccaaaaccttaaaaaaaaaaa

SEQ ID NO: 1390 - DNA, 176 bp, Homo sapiens
  misc_feature (1)...(176): n = A,T,C or G
gggggatttttggggnaacangcttaaaggactttggggnggaccncatngaagtttcagacaatggatgtggggtagaagaagaaaacnngngaaggcngtagctctgaaacatcacacatctaanattnaagtagncctgccagacctcncngcangnttgaaacttttggcta

SEQ ID NO: 1391 - DNA, 217 bp, Homo sapiens
  misc_feature (1)...(217): n = A,T,C or G
agaacctgggaagacctcagcctgatccctttgnncttattctaattcccaggagggatgctggnncctgcttttatgctctggncccangtccccctggnagaacagcagttnggatcttgcacagtanganctctgaaacanacagacagacttcctttnaggacatgcctangatactcaacatggtgtctttgtgtagaacgtagtggtgtat

SEQ ID NO: 1392 - DNA, 364 bp, Homo sapiens
  misc_feature (1)...(364): n = A,T,C or G
gaggagcaacctctcccaacccctctcttagccaaactaagacagagtctccatttgtttcaatggggggaaaaaatcctgtgttcagcgcagtctcctagagctctgcctctggacagcctgtgataatgacatttggtgtggaaggcttcctgaagatgcatgcctcacttcagagctaagtctgtctgacggagggtctgcagaggccccnganncaatanngganangcngcantgangatanccaagggagacacganaacatcnntgttgngancacantgttaccaccancctntnctacagcgagcacaggatgctgacaatccngccagacngctgacatctctgtagctcgata

SEQ ID NO: 1393 - DNA, 316 bp, Homo sapiens
  misc_feature (1)...(316): n = A,T,C or G
tgggtgcagagcccttgcgttgagcagctcatgggagttgaataaaaattnacngtttctgtttaagctaaanaccatattcaggttaacgattgcaacagaaacanttatnagtnccacaaacttaccactctgnnnggccttatgaagagccatggacttgatgctccttcacagctgtantcctgancgttgtccttcangagangcccatctnagcatcagggtttcccagtctgccagtctgacgaacantcttgtccttcttcagactggtntgttgggctgtctccatacagattggggagggtggggg

SEQ ID NO: 1394 - DNA, 226 bp, Homo sapiens
  misc_feature (1)...(226): n = A,T,C or G
ctcgtgtgatgcccaggnacactgcaataaaagtgtgacaatggaaacagaagatgtgaatacaaccgaggcagactcttcatcaatgaaagcagnnacagagtcaataaattaccagtggggagccctcgggtatcatcagtatatcaaatctgcatgtcttaaagagataaaagaaataaagcaagcctatcagctactagagtagaactttgaaaaaaaaaaa

SEQ ID NO: 1395 - DNA, 178 bp, Homo sapiens
  misc_feature (1)...(178): n = A,T,C or G
ccactccccactgtgggtttagntgatcctgaaaagaagcctggccttggaagaggccacagcccacccaccaccaccccacactcccggncatcaagatncaggtctnctcttctctgcctactacccactgancntgtncttcaagcacnngntgcatatgggtgttttcctagca

SEQ ID NO: 1396 - DNA, 364 bp, Homo sapiens
  misc_feature (1)...(364): n = A,T,C or G
taaggccctggttctctccntgaactgtcctgcaccatgaacaccaacaagctggaagaaaatagtcctgangaagatncagggaaattcgagtggaaacccaaggtcaaagatgaattcaaagacatttccatatacttctccaaagaagaatgggcagagatgggagagtgggagaaaattcgctatagaaatgtgaaaaggaactataaaatgctgattacaatnggggtnagagcccctagaccagctttcatgtgtnaccaaaggcacagcantgaancccctantaaatnacngngaggatnctgangaatagtggacncctanncaacaaagtcagnncttcttgggtgcctttccg

SEQ ID NO: 1397 - DNA, 315 bp, Homo sapiens
gactgagatgctgtctgtggaagagcttgggaagacgtgagaaggtgggtttgggcctgtactggcatttagccttggtccaacctaaagagagtggcgtggcaacacaaggatgctccctgcaagacactgtgagccgactccggtcatgaagcttgctgctgtgggttgcagacagctgcaacccctttgcttcttggaggtctcaagtacacaaaaagtgatcctttcagaagaggctgctgggtctgtctcctgtaaccttggttcaatttgcacatgatcgtctcctctattagacactttaaagctcag

SEQ ID NO: 1398 - DNA, 424 bp, Homo sapiens
gatctgagccttgggccccctggttcccatcccagatgccgcagacatttcagctacatcagaaagaaatttcttcttcgacttctatttttcatgaactcaagtttctctcaagctgatcaaaggagtctgcagtgaccctgcttaagtcaactccctttgattctgtcccaagcccaagtgacatgacaaatgttgggacactgtccccagaggatactgaacagattactagcttctctgtgcttccatcttctgccacagggacgaagagtgctgtcacacagaactgtggcggggatagattgccactatcatctctgtgtgcgagcaccagagctgggtggcgtagcatttcctctatgacatgaggagagctgagcaaagctataataaatatcggagagtctcacataaaaaaaaa

SEQ ID NO: 1399 - DNA, 212 bp, Homo sapiens
  misc_feature (1)...(212): n = A,T,C or G
aggctggccgccttccctaggtaagatcaagtggtcccagtctngcacaaataatgcctgcagggctgcttgttcatggtgcactctagaggaaggatggggaaggaagacaccattgacaagcaaaagcgtgcagaagtacagacggccccaccaagctccatttgntcagcggcaaatacacagactggattcattcagtgtcatcaaga

SEQ ID NO: 1400 - DNA, 155 bp, Homo sapiens
  misc_feature (1)...(155): n = A,T,C or G
aacgtggataggttgagggagacaacnatcgagnagacataaaanagtgcatctcgacnctcatgntcgggacactacagnaagangctatctcggagaccancagagcantancggacnccaaggagagagcgnacatgaagcaagagagagag

SEQ ID NO: 1401 - DNA, 186 bp, Homo sapiens
  misc_feature (1)...(186): n = A,T,C or G
gattttgaggcgacgcatctcaccttntttgtctcagaagcagatgatggagttttccgcaaaagacaggacaaatgatgacatcatctttacctgcttggaatacgtattgtgcattgttttaaacgcggtttctggtttagttccaatacaataaacacatcataggcattcacaaaaaaaaaa

SEQ ID NO: 1402 - DNA, 419 bp, Homo sapiens
  misc_feature (1)...(419): n = A,T,C or G
tgagactcggctggaggtagcttggtggtgaagagcaagaagtgctctcagaggccccagggttggctcccagcaatcctgtcaggtgcttcacaaccaattacacatggagtaaggacaacttgtgcatggcatagaatcagagttcatctgagacaccaccgcgtggaacagggaatttctcaacctcccgagaaaggagaagagatggtagaagatgaaagatgaagaaatggcagtaggcacaatgcagtatgctggcttggtgccctgagtgctccatgatacagatgactgggaacagcttcagactgatatacattctccttagatccactcatcagagatgttttgcagcntncttcattttttcaaaaaaagatttatttcatatatnagagnacactgtcactatctcc

SEQ ID NO: 1403 - DNA, 182 bp, Homo sapiens
  misc_feature (1)...(182): n = A,T,C or G
ctgccctggcttcagtacctcancactgcagagactggaccttctctttgtagattgcatgatgatctttcctaaaatttttgaaagtttttatttggnaattntcatggngttcagccaaggatatgcattcagcggacaactaaatgccattaaatgcttatgcaatctaaaaaaaaaca

SEQ ID NO: 1404 - DNA, 245 bp, Homo sapiens
  misc_feature (1)...(245): n = A,T,C or G
atttagagggccagtcctatcctcctggtaatcctatgaggtggcgtacntcctatcttaccccatttacagggtaacagaagtgcaaaggggttaattagcttgcccaaggtagcttggtaaatagtagagctagactcctcagcagcccagctagaacctgagttcatcagtctgtaggacctgtgttcattggcctatagaatccatgttcattggcctacatttcactgttcagtaatggg

SEQ ID NO: 1405 - DNA, 270 bp, Homo sapiens
  misc_feature (1)...(270): n = A,T,C or G
cctgctggagacttttgtaaacncagatgccagnatcccggncataanagacttggattcancagacccnangncaggntccaggggatttgntggttgagggtggagtagcantggagnctttttgtaaaggcttactgntatggnnnaggggaaacagccncatccaaaaggactttgcttaatttgtnnnnacctgancttctangtaatttttccttcaagngaaaacaagctgtatgtngatgggggtgcactcgcctcacaaaa

SEQ ID NO: 1406 - DNA, 175 bp, Homo sapiens
  misc_feature (1)...(175): n = A,T,C or G
ccagcacccattggtacagggnnccgaaacagctacagccaccgccacggggcccaaggagagctgcantttnatnccatggttnacnctgctgactgtanccgatgcangatctcctggcagcntgcgaaaacacctgcccaaatactacggngtcttggatcccctgccaccg

SEQ ID NO: 1407 - DNA, 236 bp, Homo sapiens
  misc_feature (1)...(236): n = A,T,C or G
aaacccctcagcaccngttttccaggagaanccacatcccctacagccaccaccaccagnatgatgttnactcgcgtcaacaccccngacacngccccgccanctccccngaggcccnnaccatgtagnncgnagncngnaaggccgcatgagagcaggcgaccgggggagggnggcaggcangnagnccaagggncacgacgggcacatcaccnncaccgcactcttatccaggc

SEQ ID NO: 1408 - DNA, 391 bp, Homo sapiens
  misc_feature (1)...(391): n = A,T,C or G
ctgagaggctgaccgcggccccttaggagcctgaagaaacagcacaatggttgctggaacagaggaaaggagggcagtggctcagccaggacagcttgcggttccgtacagtctccttacgngttggtaagttcatctctggtgcagcatgccactgccgccaccatccttgagactccagcttcttcagctttttgaagcagatgacaactagtggctctccaggaatcctaaggccttcagtgctggctgttagggcacccagcatctggaactgagaagcctgctgtgttcaggacctctctatcacgaaggcatccactgttgaacaaccccaaccatactgaataaaacaatctaataaaccctcttttaattcataaaaaaaaaa

SEQ ID NO: 1409 - DNA, 188 bp, Homo sapiens
  misc_feature (1)...(188): n = A,T,C or G
gaacgacaacatgcagaagagcggacattaccgggcaacangaaggccnggaggacctnangagaaagcccaagagcggaccatgtagcgctngcacngcacangacccacggaaacccagnggcaaggggccaagnaaacgctccccacacacaagaagaaancngaanaccacctacaaaagaaga

SEQ ID NO: 1410 - DNA, 218 bp, Homo sapiens
gactgagggctctagtagtgctggttcaggccttcctcaaggctacaggaaatggcgcgaacgttccatggtagggactccgaagttcctttgtcacccgggaggttggagacccacccacaaagctgacgtctaagagccaacaaagagcaccatgataggtgcttgattgctttcaggagaccaattaaaatctcccttagaggaaaaaaaaataa

SEQ ID NO: 1411 - DNA, 356 bp, Homo sapiens
  misc_feature (1)...(356): n = A,T,C or G
cttgacctaaggaacattgcataganaggccgcnccganagatgtantgggnnnactnggatnangtactntgtanactncatcatgnatatnaccataggacatcgttatcgaaagcgnagtaggaaccangancacangatgnntccttccaagcccaccctnagatggtgcacttcttacaactnnagccacacctcctaacagcnccacttcctatanacnatttncacacccncattggnaaaacccctattcctgagctataaanactntgtcttccacacatgcagaccttgcaaaccccaccttatggggaggcagcctgngtacatgaataaaacagctttaatggg

SEQ ID NO: 1412 - DNA, 377 bp, Homo sapiens
  misc_feature (1)...(377): n = A,T,C or G
atttagttttgtggacttccagactnanaacggnggnaaaacagcatatnaacacctacagnnggcagntntagtaaatatgggcacactatacccnttcgtgccgagcgcggtaacagnattaagaaaatntgccccacntcgctctccntacgacgaccggcttttctgcgcgcgcgggtcgtctccggcctatnagaccgngatggcgttcctgtgtcagangaganagntacgcacggnagttnaccaccaccgtggtntcctgtngtcccgccgagctgnagacggangcnaacggnggcacgaaagangtgnngancaggatnncatgnggtnnttggaagacacgctgcttttcctggagggcaggggga

SEQ ID NO: 1413 - DNA, 240 bp, Homo sapiens
  misc_feature (1)...(240): n = A,T,C or G
tttcgccatctttggaaaaaaggagaatatggttggtggtttctaaagcagcangacaaaaggaattgcggaggtttatgaaattcatttcagaaggttctttatactagtagggctgttaaaggaagaacaaagcttctgatttacttcagcaggataaggtgtcattagtgcaagaagacagaaaggatatgagaaataagaagtagctctgaggagagcccaataaaagaaaacaaa

SEQ ID NO: 1414 - DNA, 483 bp, Homo sapiens
  misc_feature (1)...(483): n = A,T,C or G
gaagtggtcctgaagagaancttatttgtttggttcgtgagcgtgtagaccatcactgttcgacggctgtgatagttgtccttatcctgctgtgggaaggtatccctcgcctgatggctgaccgcctgtacaaagagctcactgagaacttgaggtcctacagcggacatcccacagaccgaagatgtaccctcaacaaaaagtaatcagacctgcattgttctccctccctctgttgtgagcagcaaattgataagtaactgccaactgagactagcctgtgagtagcaggactctaaagtaccatggaaggaaaacggacccacagggtcccgtgctgcacaccgtgggaggcagctggacttccatgagttggagctacatctgcacagggagaccttgtgtttcttntccccctacacctgcagtgcaattaagactattttgctgggactggcgctcaacagctcagaacactgaccg

SEQ ID NO: 1415 - DNA, 260 bp, Homo sapiens
  misc_feature (1)...(260): n = A,T,C or G
gattgagggtaccagatacaagcactttcctgtcttggacctcagaattctagtntcactgtcatngatttaccaagttgtctcccagatgcctggatacagcagcaagaacagaaaattgatattcatgtcctggaacaactgtgacttgcctgcatctcacctgagtgctgggattaattcccgatgaccaacttctctcttaattctgctatgaatacattcttattggacaggttagctgagtaccaaaaaaaaaa

SEQ ID NO: 1416 - DNA, 151 bp, Homo sapiens
  misc_feature (1)...(151): n = A,T,C or G
ccactgcggcggttttcgcagccaananacctttacttccactccatttggggcctggggattttagtcacctctccagttggccccaagactgtcttttctttcttgagtctaacatgtaaataaagaaaatattattgaaaaaaaaaaa

SEQ ID NO: 1417 - DNA, 432 bp, Homo sapiens
  misc_feature (1)...(432): n = A,T,C or G
acagggaacggcctctgnccacccgancggagagggcaacccnnaggcanggtgttccgtgctgcngtccgcgatancgggcaaggactatggncacatgaatctttttttcnnngaagncatganacgaatncnatcangcncaaganntanatnaattnctggcatgaaaaaaantngagngganagagataantatttctcatgtcttccttctcctggagtagtttggcttctttcaaatacaactttnctaccactttgtggtcaggagtgggtaaagngaaagaagaggagaccctccacagatgtgctggtgaagaattcttggagatccagggcttctgtgtctcatcgnagggcttctgggagaatcaccnggctttatcntgaatactgannatcctcttaaaaattactgatgtacaattg

SEQ ID NO: 1418 - DNA, 371 bp, Homo sapiens
  misc_feature (1)...(371): n = A,T,C or G
actgagcaatacaaagtaactnagacanaccatatggncagagcagacagtattgcntagcacatgaagcatgcanggccttacagangacanngccangtcaggctacatacatccaanantgcntctcntngaannngaggagtntacctngtggngtatgaatatgttgcagcaacatgctctanaatcttgcacatgtggcagcaaaaagtgatcctcangagtcaagttacctttccacanncaaatgtcnnancttgcattnccttgaccatctatttntgnnnatggggacctantttgggtctgaagcactcantcttggncatccnggatgnatattattcacttgctcttgctgatggaaa

SEQ ID NO: 1419 - DNA, 493 bp, Homo sapiens
  misc_feature (1)...(493): n = A,T,C or G
actgagacagggtatcacatatgtgngtcctgggactgaacttgagtcctctgcacgagcactaangtgtanctcgacacctgngccatttctccagntccttctttattncgtgcaagtctgagtactgatanaantcttcacagcactttggaggctgaggcangaagatgccataagnncanggccagcctganccattactganngnncatatttcanaaacctnncancaangacnagagccataacaaaggcctgtgatagnnactgttcncgncanggccactcttntttatatganaaacaatgggtcattgntcccacctgngaagaacaaacnntnttccttcnttctacagcaactgncntattattanntaacanacacttnntaatcatgtcattnccccctntctcctctntgtnccatccccttgccttcccctattccctcccacacttacagctttacaaatgaataaaagtgtca

SEQ ID NO: 1420 - DNA, 548 bp, Homo sapiens
  misc_feature (1)...(548): n = A,T,C or G
gactgaggtggcttccagagtcatcccgntggctcctccttcacggcaaggcccagcaagctgtgcagaaccttcagaaggtggccatgatgaatggcaggaaggcggaaggggagaggctgactacagagatctgcagaccttgcgnacagtgcangcagcgctgggcanaggcctgcctggccagctccttcatntgctgtgtntctgtgtcactgggagaactctatcccacaganatcaggcagatggggatgngatttnnttntgtnantgcccncctcngnggctnggnggcacccntgatnaccacacttgncgagatcagnncagttctgccacctgtatcctttggtgccacttcagtcttgnntgnaatggctgtngnctgcttcctgactganacccgcantgtnccnctgnnnnaanctattgctgcantggagagacnagtcaaacnnggccgttccaaaaganacacagaacagaagagtgaagaantttctcttcatcagntgggggcttcacccctcaaagaaaccatttaa

SEQ ID NO: 1421 - DNA, 525 bp, Homo sapiens
  misc_feature (1)...(525): n = A,T,C or G
gctggcaagtccctgnntntgcacaaancttggcctannnnagcagcccaacgcctnangaaagaaacgcanngatggatgagtntgtctgtccccttcangtatcaacagacattaaggaggggatatctattgcgttnatatgnatgcaatataacacactatctcggatgcccacggcccggngtctaccactgngaaagcaagaaagaaagcttcctagaccatatgtgcaaccaaacactggggctcctatctgnctgtcacttcggaagaggagctactgaaggacggacagcagtcccacancatgttgaaggtggtagtacgccgtaacaaatttatttctcctcccgacccaggagaaagagacggccggagcttttacagataattcagttaatatcttgattgtagtcctgttntccaagangnnnagnaacatctattnngngnaatntgngaatggaacccatctacagncctatcnctttgacagggngactctaaagcctctattccccg

SEQ ID NO: 1422 - DNA, 171 bp, Homo sapiens
  misc_feature (1)...(171): n = A,T,C or G
gattgaggtctccactccagggtagttgtatccttttaaggcccttctcctgccacctttgatcagcctcactannaccagaagcagagagagaacccacagactccctcagcctcagcactggggacagcgccttagtaaagtcaagggtccgccttgtaaaaaaaaaaa

SEQ ID NO: 1423 - DNA, 188 bp, Homo sapiens
  misc_feature (1)...(188): n = A,T,C or G
gactgaggaaggagtcttgctgcaggnnactantgacgaagtggtgcanccacagagncttcaggaaanangaaattctgtnccatctgacagtagttnttgctggtgccttcatttaagacgcactttttaacganaagggaatgttttctgatnnaaaacttcatttantacaggttcttaataaa

SEQ ID NO: 1424 - DNA, 152 bp, Homo sapiens
  misc_feature (1)...(152): n = A,T,C or G
atgctgccacacttgcctgctacggtgctgtaggccctgcccacaatcaagcaggcatgcacagcangcaagngngnnancgaacaaacaaancttntntctataagcttnctggttnttgaggttncatcacagaaatggaaaactataat

SEQ ID NO: 1425 - DNA, 384 bp, Homo sapiens
  misc_feature (1)...(384): n = A,T,C or G
gactgagatgggacaacaggctcatgaagatggaaggaacaccgaaggtcactgatggctggtaccagcttggttcctatctctggtgctctgtggtagaatgagaaccctaggggcttatggatctcaggctggcctcaaatctcagcatagccaaggatgacctcgcttgctctcctgaccctgcctctctgcaggcttggcatcactccgtctgcctgtcgnggattggtgctgctgcattcggaaaggaaggagaagcttcctcccgcctcagcaagctggaagtgggggaaggcccactgtgtgacacccatgctaacaagggctaccccgagtcagatgggcaggctcaacattaaagttgtttgaatataaaaaaaa

SEQ ID NO: 1426 - DNA, 224 bp, Homo sapiens
  misc_feature (1)...(224): n = A,T,C or G
atctgaggatctctctttgcaaccntggctgtncaggcaactctgtagaccaagatgcccttgaactcaccgagnatcagtactgactttccttccccagagcagaggttaaccggtgtgtgcctgcaaaaggcatgtgccancaacccccaagagctagaatgttccaggaacccttaggaacaataaagaccggtcacaatgcttttttgcaaaaaaaaaaa

SEQ ID NO: 1427 - DNA, 233 bp, Homo sapiens
  misc_feature (1)...(233): n = A,T,C or G
tgaactgtatattacagnacacgcacacnnaggcatacaatgaggtgatttaggttactactggannnccangccanggncnnntacctgnntgggnagctgatggggagtgangacnccagnctgcagcatctaccccacaggctgcttngcagctggaganngaacacatgcacagcagcatcgccccagggggacgactgaaatgctgttntaaagaggacagatcacag

SEQ ID NO: 1428 - DNA, 511 bp, Homo sapiens
  misc_feature (1)...(511): n = A,T,C or G
gccctccgaccctgtttcaatcngctccggggactgtctccctccaggacgggtaaggataccatgtaacaagttctaggagcaaaccggctcactgggagatggagggcaaggctgcagtataggaaggaccattaccagctggcaaaagaaagctcaaactgctgcatcagggagctccagcccgggggagcttctaaaagctctagcctgcagaggggaagctgcttcgagacactgagtgccggccagaccaatctatccctctggccctgctgtgggtcatcgccatgtgcctcatctgagactgtttggatttcctactgctgcctcacagacggaggccagggcttcaggcacattttctttttaaatttagacagacttcagttttcatcaaaaccctgccgctttgaaactgtgctcttgagaaaaagactttgtccctccccagtgccccacgcctcaaccccacgatgcttagccagtggttaagagctaatatggctag

SEQ ID NO: 1429 - DNA, 246 bp, Homo sapiens
  misc_feature (1)...(246): n = A,T,C or G
cactactggagagagnggggtcaagatagagttattancccgtatgnagaggtngtctctaagctattacggagganncccatanggtcnatanaccnttgctgttgatnccnnggtganncagaannctaccgnnngagtnagtgtgatgtgntacctgaagaaagccatctatctgcctgtntctttcccagacttagccacccacacaaatnatgggctgtggtctcatcaaaggacatgaag

SEQ ID NO: 1430 - DNA, 181 bp, Homo sapiens
  misc_feature (1)...(181): n = A,T,C or G
ggaaggctttcattgngnagagtctcttcatcctcctgagtttctacctcacaancancaacaaaacctcacctacattatgagactcanagaaaacggnaatacatgcttgaatantgngctatgngaagntaatgatgagttttgtcaagatggaatgntgatagataataaatacata

SEQ ID NO: 1431 - DNA, 326 bp, Homo sapiens
  misc_feature (1)...(326): n = A,T,C or G
ccactggaacttgggtangtgcactcagnctnagggacnaagcncatnccttngnaccagtctggaatgcctttgtgaagganacttnttntcaagccctaccatnnacagtggnncggttcatagcctccaatgaacgaatcatnggctcacnaatgaggcaacagttncatccccattanctnaatcctagnatgataaccagaaatgggtggaaccttctgatagctgtcctatttgagggcacttaccctcttntgtggngcagtgngcncagnattncanngntctnactgnggactataacatgctctacaaccagtgtt

SEQ ID NO: 1432 - DNA, 341 bp, Homo sapiens
  misc_feature (1)...(341): n = A,T,C or G
gactccaagcaaccaggtatcttggctggcacatggcttctgttgtggttcaatctgaagantngnaangnctaangnnccatccaccctgantgngaccntttttttggggnncctccantcaaagnttncntgcaacngtntcggctgntgacttggtttcaaggctgagtattgcctggnaggctcggcaagcctcaccctgcttccatcaacaccctggggctcccagcccctcgagtggagaagcttcgtgtctgcaggacgttggaagacgaggctgatcctgatggattgtgttgagctctcagtggatgtgtgaaggagtttatccacaagat

SEQ ID NO: 1433 - DNA, 150 bp, Homo sapiens
  misc_feature (1)...(150): n = A,T,C or G
ttctaaagagagtaatanaaggagctcaaggggctagcgacggtgaanacagcatgaagtctatntgctctgtgtcactgaggnganaganagagananagngaganaacttcagatgnngagagatgcatacgtgggagcacatgcttg

SEQ ID NO: 1434 - DNA, 155 bp, Homo sapiens
gaggtctagagcccccagcttccataagcacccaaaacagcacgacacttcctcacagtcccctgcagtgtctgcgagtgagaaagagacgtccccacacctccctactctcttgaataccatcaataaagttcgctgcacccacaaaaaaaaaa

SEQ ID NO: 1435 - DNA, 236 bp, Homo sapiens
gtctcctgcttgatggtgggcgtgtgctggaaaaggccttatccacagcccctggtcaacagtagggaaaactcctgcatctggggaagacgttaggtaaatggcaatggttccaagtagggcagttctgttcccttgagaaacctgatgtcatctagtcatgggatggatgctactcgttttgtgtgtctcgtatatgtgtttctgtgaacatgcataccctttaaaaaaaaaaa

SEQ ID NO: 1436 - DNA, 152 bp, Homo sapiens
  misc_feature (1)...(152): n = A,T,C or G
agccagacccgccagtgctcttgactgctctatggccttggttcctctgaagcaaaaaggaagcactacagcctctgaataatttcagttttggaatttaaataaagccctgctcaatactcaaaagagntaanaataacaatttcccacca

SEQ ID NO: 1437 - DNA, 192 bp, Homo sapiens
  misc_feature (1)...(192): n = A,T,C or G
gggtgaccggcacggngctctncagctgtctcaggagcaaaccctagtaggccctgcgngcctccaaggagcccntgnatgatataggcgctgagaccgcngntcancgangggcggagtggacagcctcgctgccnaagaccctctcggcatggtggagnagnaggctcgtgtagacacgaccatgacgtt

SEQ ID NO: 1438 - DNA, 362 bp, Homo sapiens
  misc_feature (1)...(362): n = A,T,C or G
gactgaggctctcagggaggtcaggctggcatcgaattggagaatagccaagattggccttggactcctgatcattcttcgcctcctacccagttctggccaatgatcttgacaagttacagcaacaacaatcagttttcaaaaggactgtggagattacgtgtgaacccatntgnattgtccaggataatctcntgtanaaggggacatggactacctgacaatgaagactggaattgccccaanaaantncttgtatacaggnnncacaacccccttgttttattngccatnttcctcccctaccttgggaggttacagccttacagaacccttattaaagtgggttttaaaaaaaaaaa

SEQ ID NO: 1439 - DNA, 208 bp, Homo sapiens
  misc_feature (1)...(208): n = A,T,C or G
ccatatatgacatctanattcnacgattctacnttgctcannatactnactttgcgcncncatgntctaaccccttngtcngtcctctcctcncctactaggctnnaggncttattagtctctatggnccctggaacctgctttgctttgttgggcacctgtcacccangcgtctctctactaagccactttacttgtctgcctcact

SEQ ID NO: 1440 - DNA, 265 bp, Homo sapiens
  misc_feature (1)...(265): n = A,T,C or G
cccagggttggagggcnacaagaagggncaacactagntgnaaacacanggcctgcgggncancgacacacagggacgcggcccgncgacnccnctcaggaggagagggccgcgccaggangctacccagaaggncccanncaggaacagaacgaaaggagaccnacagcaacccggacgnagnggngggacgcggcacncccaagccagaccgngatcgccnnacnagagcaggcagaaagancccnggagggccgggaagaaa

SEQ ID NO: 1441 - DNA, 279 bp, Homo sapiens
  misc_feature (1)...(279): n = A,T,C or G
gactgaggagacaagaagctccaataaagttgtgagcctacaagctgtggttatgcactctagtaacccacggaaggattgtaagaagtgggagttcaccgtgtatctggcactggccgaagctgtgcaagttgatgtgcaagagtaattctcaaagatgtgcagggtgccttgcatggtgtaaaatgaaatttccttggctgatgcngtggctttcataacagtacctcgacatttcatttttctagataaatgggtaccaaaagtcaaaaaaaaaaa

SEQ ID NO: 1442 - DNA, 164 bp, Homo sapiens
actgaggactttgtcatcgatgcagttgtttcctgataacggatggagtgcctgctgtattgagattatgggtgtgggccacagtgcccagccagatgtatcttctaatccaccaagggaatctgaactgttaattaattgttaattgttaaaacattgctggg

SEQ ID NO: 1443 - DNA, 242 bp, Homo sapiens
  misc_feature (1)...(242): n = A,T,C or G
gcaactccccactgggttttataaaaggnaacgacaagatggccgcacagtcggccttcctggctttctnggaccccagatcagccacacaccagcnagctctncaaggncaggacctgaggcntntgncanangggagctggcttnngancannacctagatgagccanagacctgctcgnaagccggnaagctccctgaaantagctagcagaaatctccctagcttccttgaccacgtt

SEQ ID NO: 1444 - DNA, 396 bp, Homo sapiens
  misc_feature (1)...(396): n = A,T,C or G
atgagggggaagagcgtgnaagcttactagggctncgtcctncctacacttattcctgagtgnanganttgtnnnatccngccntccatgatatgtacgnagggcagngaggnttatgaagaagtnaagantagggagtntgacctgagggacatgcacctcagattctacaccacatagtgagtatgatttacagnnaangcntttttgtgagcttntactcgcgtggacaccaantatgtgagncncctttaactggttggaacaccacgagaaacagacacacgtaaaacaacttaatttttgcctcttcctttataacgcagcacataggtcttgtatctaaaatgtccttgtttcagaatgagattctgaataaattcatgttatatttca

SEQ ID NO: 1445 - DNA, 225 bp, Homo sapiens
  misc_feature (1)...(225): n = A,T,C or G
aagaggacgaagcagtancancgggaaagcaatgccnccagntgacacatctgggatgtacagcgnagtacgnctgcacaaaggatggaggncaggcnaaagcagaaatcctgctcccttgctggagctctgcnttcttatgnttnctacaaggnggatncagaatancagggcagcngcngacctttntcctnccacctttaaatgccaccctcgtaaataaat

SEQ ID NO: 1446 - DNA, 273 bp, Homo sapiens
  misc_feature (1)...(273): n = A,T,C or G
gatgtgtgcagtagagcacccaaggaggcctgaagaggacgaagnagancaccgngaaagcaatgcccccagctgccacatntggatgtacagtcagtacggctgcacaaaggatggagggcaggcaaaagcagaaatcctgctcccttgctggagctctgttttcttctgatttctacaaggcggatacagaatagcagggcagtgttgactttctcctcccacctttaaatgccaccctctaaataaatcacattaccaaggaaaaaaaaa

SEQ ID NO: 1447 - DNA, 332 bp, Homo sapiens
  misc_feature (1)...(332): n = A,T,C or G
ccccccaatggttaggggggaaacacaagagcgccangnaaagcggggctgtgnggggnnttccaccttcccgagtacccgagntanngacnagagggactctccggatgaccaataagacgcggtcgggacacggagcnnagaggcacaggcaccctcgcttcngcacatacacgccaanggcgcatgacccgnaggagacnnncgacgcccgaaggagacagcgttttttttanccanagngcnncgaacaaagcngcgagggccctgcnctcaggagggaagctgnnnanagggngcccccgcgcncacgcnccagaccgtgaacgcgc

SEQ ID NO: 1448 - DNA, 197 bp, Homo sapiens
  misc_feature (1)...(197): n = A,T,C or G
tcagcagactatactganttgctgctcttgnttgttncccagcntgcacagatggctnacacgccanctgnnncaaganaggngatgccctgttatgggctncctgggcacgcaggaatacatgtgatacatagtacataagtgcaggcaaagcacntcatacacagaaagtagataaaagtgcacatacaggtaaa

SEQ ID NO: 1449 - DNA, 174 bp, Homo sapiens
  misc_feature (1)...(174): n = A,T,C or G
caggctccaggcaacantacaataggagtctgangacaggaggggacagagaggaggggaggcagcaaggaagctcttcttggctcctccagagccaccgctgcaggccatacatctttcancactggataacgtccaccactgacaataaattcgaatgacagtcaaaaaaaa

SEQ ID NO: 1450 - DNA, 268 bp, Homo sapiens
  misc_feature (1)...(268): n = A,T,C or G
acgagttttgagggacacagcncgcggttttgaccggaagaccangagacnagnaatanacantcttgntganganttgaaggcgcacatagatcgaacaccgggtgcaacagtcacncnggcagtgatgcacgtgtgnggaagacctggnnanntgcttgtgcaggtcanacngcatcnggtgggaagaatnaacaangaanctaggtacacccccacccctctggnggagagatagcctcttttttctaagacaccaaaaaaaaaa

SEQ ID NO: 1451 - DNA, 327 bp, Homo sapiens
  misc_feature (1)...(327): n = A,T,C or G
gctccgggctacattctgatgcgtccatggaactccantcacaggaaccttngatccatcctcacagcccccatctctgctgccatctgtgttgtccacagtgggctctgttntcacgtccaggctttaacacgctgatctgttactccacgactacagtgtgttgtcatcacacccgggtctggctgtgctccttgctttgcgactggactgcccccnacccgggcccccacctcttccactgnnctgtaatctttggttgcaagttaagttacagctgatcccatcanttggctactgagattagtggtttaataaacatggatg

SEQ ID NO: 1452 - DNA, 289 bp, Homo sapiens
  misc_feature (1)...(289): n = A,T,C or G
cccctgtagagcttcaggcagcagctnccaagcttctcacaggggcngggcaactctgaagtctncagtgagggggtgcccagctccatgaccaccccagatcccatctcctcaaagtgcntgntgcttctcnntcncatanangaggaggacggngtncatcacnnatgcagacgntcctncgtncaggcatgtccagtagcagcactttgcacgttgttgactccaaatgaatattaaacacagaacctnaccgaggccagccctgcggggcaggcattgaacctaa

SEQ ID NO: 1453 - DNA, 182 bp, Homo sapiens
  misc_feature (1)...(182): n = A,T,C or G
aggacccgacggaagagaaaagacagaagaggcctttatgtgccctggacttgngcatagattagattctttcccaggaccaagagaggaactagtaactaagccattggtttgctaataatctgaacaaaaaaagtagaaagtcacataagccaaataaatggagtctaaatttttaaaaa

SEQ ID NO: 1454 - DNA, 534 bp, Homo sapiens
  misc_feature (1)...(534): n = A,T,C or G
ctctaccttgactttcagggagccaccnngttcccccagagccagctcacaaacttcactattgatctcatggaaaatgtctatggtaaccctcacagccagaacatcaccagcaaactcacccacgacactgtggagcaggtccagctacaggatcctgactcactttcacaccaccccagaggactacatctgtgatcttcacagctgggagtacagctgttntcaggctagtggcagaggcgtttccgtgggtgtcccggagcccagagaacagtgggagtcacttctgctacctcactgacaaccacacctctgtggtgggaatgaggaaggtggctgcagccatgagtgtcacatctatcccagtcaagccagaggacatgtggtcagcggagggaaaggatgctggagcctgtgaccccgactgtcagcttccacacctcttctgttacccagctcagagtaacttttcgggcaccagatacccattgtcatgggtagaggaggtcaagtctgggcggaggagccctg

SEQ ID NO: 1455 - DNA, 183 bp, Homo sapiens
  misc_feature (1)...(183): n = A,T,C or G
aaccgcggtaagcaggncatganaggcccncgggctgaggacaccacagagccgctgtgacgccntcgctgcnggagcngggccgagcctgacgtntggcctntccacagtgccgcaccgggcctccgagggagcaggacggaacaanaggcttgccgcatggaaccgtgctgcagtaagcaa

SEQ ID NO: 1456 - DNA, 247 bp, Homo sapiens
  misc_feature (1)...(247): n = A,T,C or G
gactgagaataaaactctcaaacacttggngcctacaatgtggtcaagtaaacatcccatcaccacaatccagatgagaatacatcttcctaccactctgaactacagcgggctgccacctctgatgcctgagttccacatcgacttctccacggnctctccctctggacctcccccacagcaggagtctgccagccatttctacaaagggtcagaataaaagtttttgtatacatgaaaaaaaaaa

SEQ ID NO: 1457 - DNA, 313 bp, Homo sapiens
  misc_feature (1)...(313): n = A,T,C or G
tctattgcatccttcttcacaaccgaacttctcaacagacttgttctctgttacatccagtgtttcatctcttacactcttcttgctcctccgcccatctgtcatttggagtctctctctctacctaatcgtgttgaaagatgattngacatgcatgtgcacatcatcaaaggattaacagacttcaattcaaggaccaagtaaaaatatctntgattgtaagtgttctgtcaaaaggaaaagaatccatcantttacctaaattattngagacaaataaattgngtgtttaagantgtgtgtaaaaaaaaaa

SEQ ID NO: 1458 - DNA, 171 bp, Homo sapiens
  misc_feature (1)...(171): n = A,T,C or G
cagcaccagctctgcgtcttttgtccntccatcagaatccgagctggggaaggtcccagggagccgccagccagacccacagacccgcctcagtttaaaggccagctgagttccacattnggatcagggntgnacacaggaaactctgtctggaagaaccaaaacacaata

SEQ ID NO: 1459 - DNA, 170 bp, Homo sapiens
  misc_feature (1)...(170): n = A,T,C or G
ggcctagttcgaagtgcnaccagangggcatggtcatggagtatgnagctaantnnatcaagaagcggggcctgnnatncagccggaggggcgagagncgtgcaggagatcgaacgcgaggtnagcattctgcgngagatcngncacccccagcaataaagcttgttttt

SEQ ID NO: 1460 - DNA, 261 bp, Homo sapiens
  misc_feature (1)...(261): n = A,T,C or G
attgaggtaacaaatatcaaagcctcataattttccctccatangcaaaaacanngatcttgagggtntntctggatttaagctgaataccatctcctttaagactgtgatgaagaagcagcactacctccacaactaggtgaaagctaacaccaatcttgaacctacaaaaggaggtctgggaaagtctacatgatctacatgattgagtcaaatatggaaagaaacccagagaaggaagaagaaatggctggttctaag

SEQ ID NO: 1461 - DNA, 301 bp, Homo sapiens
  misc_feature (1)...(301): n = A,T,C or G
tctgaggtgccaaggaaaatcttgcctcaatcaagnagagaccggttctctgagaacaagatgaacctaccntgaccttccccctgngcctcagtgagtgagcagaaaccatgatggacagaataatattcactctggaggcagcacattgcttcaccactaggctggtttatcctctgggctctgatgccctggtgcgtgactttatctgctctgaagttaagctatagatatacttgctccacctccaagttttggagaggaagagagataatctgtgtaaaaatgttaaaaaaaaaaa

SEQ ID NO: 1462 - DNA, 175 bp, Homo sapiens
  misc_feature (1)...(175): n = A,T,C or G
ccaagaagcccacacacnggtggacaggcggggaaaancnaannggccccnaaaaaggaagcacgaggaggccgagngccagaggcncggacagngggggaagaaacagnnngcagacanncgggccgggagcaaagccagcagcngccagaagacgcacgcacccaggaccgcc

SEQ ID NO: 1463 - DNA, 157 bp, Homo sapiens
  misc_feature (1)...(157): n = A,T,C or G
ccagatggctaccaccgcngccgctgnggctgtggatgtctgcagtgggacacaccctgggtnacgccatcactgggggcttaancggnggtggaagccgntngagnccgcaangccnagacatcacttaccaggagcctnagggagcccaactgca

SEQ ID NO: 1464 - DNA, 172 bp, Homo sapiens
  misc_feature (1)...(172): n = A,T,C or G
catcgttacccccaaggctggcctgtgcganttcacantntgacaaggctagnctctcattctgcagtangtcctattttggggatgctcttcctgnaagtacaagtttgntctgatgtctgccncanacnnaacccnaanaaatctttcattctgcccacagaaaaaaaaa

SEQ ID NO: 1465 - DNA, 324 bp, Homo sapiens
  misc_feature (1)...(324): n = A,T,C or G
accttgaggactctttttaagcaagctncnggagcattccttctgctccttcttctactccagtataaaatgttgcagtgtgcaaacaattacaactacaaaacaattacaaaaattgtaaagtcaaacaaatagataacgtattagtacctagtatcgggctatgcatgcttgtggatcaagagccggttgattacaatactgcggaccagaacagccaagagttcnngtggccaggagttcaaggccgtgtttagctacaatgaaagttcaaggcctccacaggcaaatgagaacaccaccctcttctcaaataaaacaaaa

SEQ ID NO: 1466 - DNA, 412 bp, Homo sapiens
  misc_feature (1)...(412): n = A,T,C or G
tcccccccctattatgngtcncgggcactggaatgtgtttaagcagcnncctacctgcccccacgagctgacccggaactatattgncatgaaccgaggggctgtnaaagctggccgggtgactgcccgagaaaacatgctctatcgcnaactgaangacatncnaatcaatgaccaggaagaccggcgacagaaggagccacctcctatccctcccaacatgacctttgggatccgttcacggtggcttnccatcttgctacgttccntactgaggctgatcgccagagagccctcaaagcccacaaggaagagtatgctgtgcgccagggcaccctgcggatgggcaactacacncacccntagccctccccacaggaggagcctntgagatgcactaggaaaaaaaaaa

SEQ ID NO: 1467 - DNA, 192 bp, Homo sapiens
  misc_feature (1)...(192): n = A,T,C or G
cagagacggacagcccaggtatcaagcagangaggaggtnnnggaatgggatacctggnctctgatgcacacagngaggctgngtgtggaagtgcatctgtggtcctagaggagctgatcacatngaccagcccaactccatganatcctggatccaggaagcacagggcttgtgcccttctacaaagcata

SEQ ID NO: 1468 - DNA, 168 bp, Homo sapiens
  misc_feature (1)...(168): n = A,T,C or G
gaaatcgtaaaatgaagatttcgtcatttagattatgctcattttaaaagttattttaattttcaaattcagtgtctcaagtatagactggcacagtgnttaaatactgctagctttgctttgaattgtgaccatggtttgccattaaaatattttaaaacaaaaaaa

SEQ ID NO: 1469 - DNA, 373 bp, Homo sapiens
  misc_feature (1)...(373): n = A,T,C or G
atgactttaacggtggcctnacngngaccctcccctgccncctctcatgacgtgngcgtctgnanacttnaaagttnagnnatggagggcctgccnactgacaaagattcccaacnttggcaaggcctcaancatnaatacccccagncgctcttcanntnagctnaagttccaagtatgtgnaagttactganttngtcctaaacaaactcagctctggggtacatgtcctgtacagagactatctgatgtntggngccatgataggaatgtntgtatagagtgctacagaaccacgnnctacagtggtggagaagaatttnntgaggaaatagagactaaagtgtganggtttggagtttggacttcggac

SEQ ID NO: 1470 - DNA, 308 bp, Homo sapiens
  misc_feature (1)...(308): n = A,T,C or G
agagagagagagagcgcagcgcagtgcagtgagagagcagngntccnnccttnngaagattngaatnngagctatcaatgcagnantttcctangtgngtnctttctcctnaagaatgaattaantcacaaagantgcnttcgggaagaggcanctcagtncagancctaanctgtagcatgtttcgggagagaaagagcccccctggagccctcccttctgccaccacacccttggncgcttttcatctgcaaaatctgtgtgctaanctaagagngagagccngagctaacctccgagaaaaaaac

SEQ ID NO: 1471 - DNA, 183 bp, Homo sapiens
  misc_feature (1)...(183): n = A,T,C or G
aagatctgtgctaccanacctagntaagaanatccntgtggnaacactggagacgtccatcaagtgcagngtgtaccaaaaaaangagcngattcagtggaaaaaggatantgtggctaggactgacactgaanctactaanaaaacaatgggccacacagcacttaaactataaaaaaaaaa

SEQ ID NO: 1472 - DNA, 168 bp, Homo sapiens
  misc_feature (1)...(168): n = A,T,C or G
cagctatctaacggcacagggcagnatcaggcattganatgcngganacagacaccttcaaactgcnctgnttccaaacacctgacngggatnaagtntgnggtcctggcanaccctaggcnngctggaatntattctcttnttcnaaaaatttatgaaatttactca

SEQ ID NO: 1473 - DNA, 339 bp, Homo sapiens
  misc_feature (1)...(339): n = A,T,C or G
gattgagggaactctacgttttcntgacaacaagcaaanctgcataagatcccaaanagagagaatggattgcattactcggaaaggagaaaacttcctgggtgccaaatgcctcattaggggcacgggtactcaccaaagcctcaaagatgccatggaaattacgtttaactgtctgtatttataattcaagaaggaaaatgaaaaccatgagcagtntgtaccatttccagaacatttatgaagtgattactcaaagatgtgctccaaccatataaaatattaatccaaggaaaagagaaatggaatctaacaaaattatagcaaataaataatgta

SEQ ID NO: 1474 - DNA, 539 bp, Homo sapiens
  misc_feature (1)...(539): n = A,T,C or G
gactgagcttttggagtacctgtgttctaggcccctcatcaggctgtgccagagatgcaggatcctccctcctccatcacctactgggcctctgccatgaccacagccaggaacagaaatgagactctagaatcatctctcatagccaatccaagacaaactctctcttgaagtttctgccttcaaagcagatttttgtacctaccatatgctgccttttaacttattattaatgtatgtttggtatgtaaagtgtattacatgagtgtaggtgcatgcttgccacagatatgcctgnggaggttagaggaaaaactttcaggcacgggttcatgggatttggagttcaaacttagattggcaggtttgctttaccttctgagttgccatctcaaatgtcatcccctcccctctccctaccccaccattttttctttttaatgacatagtctgaagggtccaggctagttttcttgtttaggtgccatgatcgatccagatctctcttcctcttctcttctcttctcttctcttctctt

SEQ ID NO: 1475 - DNA, 192 bp, Homo sapiens
  misc_feature (1)...(192): n = A,T,C or G
aggaacaaagctagctgancagcaagcaagcaggtgagtgagtacacgttnctttcactctgctctgnnctgaggatgcnanacacgctgcttctacctctcgccttgacttcccctcagttntggactatgatccacaactgaganccggaactgggcagccaaatcagtatcagccctttttctcccatg

SEQ ID NO: 1476 - DNA, 202 bp, Homo sapiens
  misc_feature (1)...(202): n = A,T,C or G
cccagactgagttctgtcccctctggaacctctgcccctcagcgatctntntgatgtcctgtgactctgtccntgcaatggcaggtgacataccctggaaggaggtcatgaanagacagtaaactggancagcagnggaaatatttgttttaanacccacaanacatctntaccgnggaaatacacacaaatcctagcatat

SEQ ID NO: 1477 - DNA, 179 bp, Homo sapiens
  misc_feature (1)...(179): n = A,T,C or G
gaggactgagggctgtccctatgcctgcccnagtcatgatggcttgctttctgctaaggatgtcaccacacctggttgacggagaattgccacctgctcctgcactgggcaaccagccctccggaaagcaagctcgagtccaaactcagggttaatgataaagctgaacaacgtaaaaa

SEQ ID NO: 1478 - DNA, 453 bp, Homo sapiens
  misc_feature (1)...(453): n = A,T,C or G
tggctgggcctgtcatcagcacatcaacactaagttgggtttgggattccacggcccaagactgaactgcccactctgccagcactagagtttactgaggtgaaagctgaggttcctgcttctgtgtttcgggtttttcatccatggtacagctggaaacgttctcctttaccggaagtacaaagtttgggagttcttgtactgctcatagctctgcaagtcactacattcatcacagtggcttaaacgtgagctcctaagcaagaaggcttctctgacacagcctgcagaatttcctaacaaggatggaaagaaagctaggccctcctctgtctccttggcttggttaagtcttgcttctgatgcctggttttctaacttgagatattctcagcagaacagnatttggatttttncagtncataataaatgttgntccctgaatgattaaaa

SEQ ID NO: 1479 - DNA, 212 bp, Homo sapiens
  misc_feature (1)...(212): n = A,T,C or G
caaaggcccaaaaactgatttnttcttggatacacccacagttcancccctgcggccagcggcccttggcgtgctgaccgaggacacngaaggccccaaaagnggccgcannacctatatgggctngaattttcttcancacnatccaggncctcacgcacnntngtnagtctagaccgttggccagaacctggctgcaccttcccatcctt

SEQ ID NO: 1480 - DNA, 379 bp, Homo sapiens
  misc_feature (1)...(379): n = A,T,C or G
tgagctatttagtaggagagacatgtgtggaatggcaaaattaccacattccttcccaacgatgcagcaatcgcttctgagactacttatttgggataagggacaacagaccagaacccacaggtggctctgtagagcaagagctcccctgctgaggaagagtgatgtggagttatggtaagcaagactgtgacactcataccaacttctccaccagtaacaaacggccatnagggcgcagctcctagactagattccttacagccctacagaagaaagagcgcctgggaattgacctctggctacaggcccggggtcagtggggctctgtgctaattgtgtgctgtcccgcttaaaataaacgaggagccattaaaac

SEQ ID NO: 1481 - DNA, 520 bp, Homo sapiens
  misc_feature (1)...(520): n = A,T,C or G
actgagagttgggcaactcaccactgcngtccaggcanagaacattcttgncaccctaganagaagaaagaaaaacacctttatctaccactctccaaccccacatnccagccctgacaaccaccggcctgctctctgnctatggaaatttccagaagtgncctgntcagccctgcatntgncacaggntgtatgaaccggttttctacaaggctgacctgactcgggtccccactctgcccacctctctctctgtcctctcgtttttggggggaggcccatctcaagtggtatgtaggaccagccattctagtccaacaacttgtaggccagggaccaggtggtgagagtcatctctgtggatctcagactgctagtgttctgtcataatatgccacggcaaactgagggagcatacacagtccatgtgtgtctcttagagctcctacttctcagcttctccatctttattttacctgcctggtgatgatggtggtgatggtgatgatggtggcttcca

SEQ ID NO: 1482 - DNA, 476 bp, Homo sapiens
gtctttacttaaagtgttaagaaggactccaggatgggccacatccacaagccagagcagacatagaagacagctcaacatccaggttgatccccaagggaactggaagcatcctacagtggcccccttgaaggcagcgatggtccagagggtcactgaagcacccattatggtagtgtgtttgggaactgagaaccacatttcacagcctcctctggcaggcagccaccaccctttgtgcacagcatctccaagcgtggctcaccctgaaacagaggacggagccagtaccgtcacattgtctggaactctttgtgagcacaactcaatacacttggtggaaggcctggcctgttgccaaccagccttcagcagccatataccctttggacctcgtgaggacaaaaaaaaccaatgaggtaaaaggtatgtattcacacgagtgcattcatataaacacacatactcacaaacac

SEQ ID NO: 1483 - DNA, 520 bp, Homo sapiens
  misc_feature (1)...(520): n = A,T,C or G
gagggaggaaagcgctttcatggcntgnccttgctcttcagcaccnggngcatccaggggaaggaggctnttacttcagtgcgnnggnctacttgctgtnccctgacnnactgttccggaccacggnncangccngcnnccaccttttcccnatnaccgnggtcngacaggnnctncctttaaggactgctgccagaacgngcagnactccntgcatnctctctgcccggaggtcgatcagatncctnaaactggactggaaggaagccatcacttaacactggagaacacagaagccagcctagtagccctcaaaggaaaaagcttgtgcctgcctaagcttagggaaggacatgccttccaatgaagagcagtgtccctcaactgctgtactgctgtcatggatggctgactacatggctagtgtcttcatacgaccgctcttcttgaagttactcatcagtagaaacagtttgtgaacagaagaggagacttgcatttcagcatggactttacatta

SEQ ID NO: 1484 - DNA, 507 bp, Homo sapiens
  misc_feature (1)...(507): n = A,T,C or G
tcaggactggactgttcagngagttcactgngggatcccacanagataatgctgtctgctgttggcttggcatctttggattgaganattcantttcctcactctaataaaagttcccaaccacatacctttggtgggatgctccagtgaagaggatatggccgnacctcatgaggattgaagcggtcaggccgtgcctgtgtgcagtgagcanatcggattattttaagcagtcatttatctngcacaacacggtccatctggatcatccctgagtcgttacctggagatgccttttctgagcagggatgtttttccctcctagggagaggccacagtacaaaagactaccaagaaggccagcgcccaagatgcttcctctcctctaaaatcaacaatccgggtcatacggctaatatccgtatttgttttataattagccaacttgatacgtgaagaatctaacagtcaactagagctcccctaatttccatcagcttgagttca

SEQ ID NO: 1485 - DNA, 503 bp, Homo sapiens
gatgcatttcctgaagacactggctctagatggtgaaataatctggaagaacatggcagcctctatcataatgaccaatttaaagagtcactacatagtcagggctgggaattagaattgggaacagagaactggatgtggaaggatcaagtgtcctggtgggagacaagtcccgttgttgggagcatcctagggcaaccatggagggtgttaatccctgctgtggcaaaaggagcccatgtccctcttctcctggaagtgggatttttacttagtgttgagtcgggtagtgcactgggccctctgtgtgagtaatttcttcctttgtaagctcagccagagctcaaaacgctgctcatatgtttgtaaagttggacatgctagcgttcacttcttggaaggcccccgtagagctggcggtgaggtctgtacttgtttagaagctgcagctgctggtatggccagggataccatctttatggctacccattgggttctttgac

SEQ ID NO: 1486 - DNA, 161 bp, Homo sapiens
  misc_feature (1)...(161): n = A,T,C or G
caccaccaccagagacnggggncggcagcaccggggagccggncaccaaagagccnccggaagccnanggnaccgnngagagcaaaaggnccggagagccggggggagagtgaanggagagaggcagagaangggaccnaccaanggagacgggagagccc

SEQ ID NO: 1487 - DNA, 171 bp, Homo sapiens
  misc_feature (1)...(171): n = A,T,C or G
tctatctatgactcacataccacngantngnnaagggaccggtggatcatggcnctgagagnaatagngccttgcgaagaatcattnttcatgcaaaannnncacngnngncttacgggccatgaaaaacagatttttttgccctcctccttgtgtgtatcttatgggcag

SEQ ID NO: 1488 - DNA, 498 bp, Homo sapiens
  misc_feature (1)...(498): n = A,T,C or G
gctacagatggctgctgnggaccgagaggccantcgactcatatcaggnacgatgannatancgntacaaaccntggttctgcagctncttcncatgctcgtcnatatngcacacctntnggtcgacctatganggtaatcaccgaagagagcntgannctttctncangcctgtccagaaggacccatggaacagagaggacactttggttngttggggccaacatggatggnccacncnangngnatctgtntctcatctgccatcctattagnccncacattggcttgncctggnganaactgaancctggnattgnngtatncactatttanntgtgcacaganttanccataaaaattacnnacntttgnnttgttggggccaacatggctggcccagcccaggggtatctgtctctcagctgccatcctattagcccccacattggcttggcctggggaaaactgaaacctgggattgttgtaaacacatcc

SEQ ID NO: 1489 - DNA, 226 bp, Homo sapiens
gactgaggataaaggtgtgtgccaccactgtccagcttgttataaatctcatacttgacactggactcataaaacgggattcatatggttcttgctacatgaagccaagcccctattagccctgaagacactgcaggaaggtttcagccactcgtggtcaaacaggactgagactatcaaatggaaaatccaagaaataaacctcctgccttaaattccaaaaaaa

SEQ ID NO: 1490 - DNA, 471 bp, Homo sapiens
  misc_feature (1)...(471): n = A,T,C or G
ctgaggagctatcaaataacctgtttgcatatctccgtggtggccagatccctgggaccaacatatatttctctgacaatggaggattttcattccagctcatgaatactgacaaactgagtcacctgacaggaacacataggaggcatcttccacttacattccatgtctcangtgggggnacttcatggttgaaaatnntttgggcacnttgnanaacntgngncacnccctganccgnngaangnggnnngnctnnatntacaanaancncctngtagncattacananccataccagaggnggnctatggtcctctggaatcagaaaagtatantgnngtcctccaattcaggccagattgnggaacacntgcggntgatagatcagaaganctttacagacttanatgtcgaacatgccancatcaacatctacagtgttgcctnaaatgcttacgagctggcttt

SEQ ID NO: 1491 - DNA, 216 bp, Homo sapiens
  misc_feature (1)...(216): n = A,T,C or G
caagtattctcggctcctgagaacatntgcatntngtgtgcatctnttctccaacaagcattgagcgnctgacactgagagangntatgggatgcanagatgancaangaannctntttctttggaggcttnacaaagncangaagattttctggtaacaagcatacctatataggggtgagtnacatgatgctcacagcctgggaagattaataa

SEQ ID NO: 1492 - DNA, 255 bp, Homo sapiens
  misc_feature (1)...(255): n = A,T,C or G
tggaacctgaggagccncacacggagcncctttctantggaccaggagatnatnaagacnctaattngcttccctnncnctntnttcataactggcnctgaancagnanaatagcgagccttgatcatcantgaagatgacanaananctgnagcagagcaggcagcaaatctaggttgaagtttgnggagcaaacgactccttatttcactaaatgaagacagccaggggagaccctgggtggctcccactgct

SEQ ID NO: 1493 - DNA, 292 bp, Homo sapiens
  misc_feature (1)...(292): n = A,T,C or G
gactgagagtcctgcctactcgtccagtgattggctcctttattcatttggngattggttcacaagaacagcaccaggccggnccacaactgttaactgctggaaaggaanctgtcctgcttgaggatacgtggagtagccttggagtatttttcatggngtncagnccaggtgtcntgnnacaaggtgntgnnatngcnagcnnccctgntctggnnatcaatatcattatggaagnccacatntnttnatccntncttngatngangtnagccatcatctcctgaggcta

SEQ ID NO: 1494 - DNA, 317 bp, Homo sapiens
  misc_feature (1)...(317): n = A,T,C or G
caactggtcaagcgtgcncaggacanctgagntccagatgccagaccccancagtgtgtgacactgactctgcaactacaaaatcccaacaaccgcggtcacctaaacaagccctgagcagtgataacacggtgacaggcacagaaatgcagatgaagttctcacaaggctgcatgcacccctagatggagagctgcaggtatcaatggctgcccagagcaagaagtcagccctaaaatacaaaggagccaccacacgaaatgagttcagcaggctgtattataaacgtgtgcatgacaataattaaggactagggc

SEQ ID NO: 1495 - DNA, 311 bp, Homo sapiens
aactgagtgtgtttgtggaaggaaagaagaggtgatggggctactcagcctcatttgtgtgatgccctggccatggacagacgtgaatctagatactaattggaactgtggaacttacctttttatctaattatcaagacacttcataagtgagtccaacacggaagctgggagatggaagtctgtctggtttctgagcgctcttgtctatgaccagagtatgggattactacctggacatgccgctcagcacgggctggagacagtatgaacatcgcatcctcttggatgcacggatggaaaaaaaaaaa

SEQ ID NO: 1496 - DNA, 192 bp, Homo sapiens
  misc_feature (1)...(192): n = A,T,C or G
actgaggtctgagattggtncaatggaggcaagcaagcagatgcgggtatcccggccatacaaaatcagtgagtcttcaaaggtgtaccacgtggcctgaccactctactgcggtgctgcagcggctgaacgagcagcggctgcacggcctcttctgcgacgtggtgcgtggtggtcgaagagcagattaat

SEQ ID NO: 1497 - DNA, 507 bp, Homo sapiens
  misc_feature (1)...(507): n = A,T,C or G
gactgaggacatgtatcgttacagctactacaaatttcctcgtcagagagtgaatgaatctcaggaaaaaagtaaacttcaaagtaagagaagaaacagcggcatgaagaggacgaaaatttcttcccattgatgaaaccacatgtanagntgangacagagagcnaggcttnctctgcatnngcgagagtggcctnctgnccntttctncagcgnaacntgctnnntccataagngctcaggaccatcctncnccatantncctntacaggnggaaatgnttccctaananacataggntnccncnttgtnctacttcngagggacatcttacggatatttgcatttcnntaacagnnngntgnnttttnttttatgaagactnaanaattcacttatnatactcgaatantaactttatcttaacttatatnntacttgtataccatacaaatgcatgtaaatataanntgaggggatatttaanacctgctttcattcattccg

SEQ ID NO: 1498 - DNA, 181 bp, Homo sapiens
  misc_feature (1)...(181): n = A,T,C or G
ctatgaatcgtctcttnaccttctcatccatgcaggcactgccacgnntgccggtgnccgacgncaggtaagagatngtggncaaagaaagaactnnntnacagatttgcctcattctngcaatgagaaaaactangggcatgctgangaactgcnantnnaaagtgtatagatgtatttg

SEQ ID NO: 1499 - DNA, 180 bp, Homo sapiens
  misc_feature (1)...(180): n = A,T,C or G
cagatggggggctcannncctacttgancaagnanaggaancaggctcngngagaagganatgcttagnngactncngcgggggacgttacaatntccnctttctccaaatttatttttttcttttatgaatcttgcacatatatagngaattcctaatcattcactctaaaaaaaaaaa

SEQ ID NO: 1500 - DNA, 282 bp, Homo sapiens
  misc_feature (1)...(282): n = A,T,C or G
aactgaggaccccagcccatgggaatggggacacccatgtctganaagaactgagttctntcaaaatggatggactgtaccantcctggngcgctgnaatgacanggncctntgtgtctccactggnaaccaaacangggactgnctancatcttctacagcgttntgnntcttgggtgcccnttcantggtctaagaatgtgacgtttcttgggntccatctnacatnctnataaatagccatgtcncacagagccaataaaagctttctggaagcataaa

SEQ ID NO: 1501 - DNA, 506 bp, Homo sapiens
  misc_feature (1)...(506): n = A,T,C or G
actgagagaggctgtggctttcatcgggcgccccagcacttctctctcagcagtgtgactgtccacccgtgtgggtaaagaagatgttgcaagggacacaggcaggcatccagttttnatctcnacagtctncanncaagttgcaatgacaacgtgaaagggtgtgcgtgagtcccactgtctcctccacgcaagcgcagtttatcgcaaagtgacgtcagcacggnctatcccagagctgaggggccatctcagtcaccgctgaacgtcaacatccatggcagagtgcatcaggttctgccgacaatgaaggcaacaggagactgagcggtaacgaatcaaacgacaggagctagggaagacctgggatcatctgtgggaatgacacggacagagcagacgcggttcaacactgacgcttctgacaaattatttgctgtgagggccaactccaagcagccttcattagcagcatattaacacttcccggtgtaaatccggatgct

SEQ ID NO: 1502 - DNA, 350 bp, Homo sapiens
  misc_feature (1)...(350): n = A,T,C or G
agctcttaatgacaggccnggttgcccatatgtactagnaatcaagggcntttgtaattctaaaagntnctggacataattnntttttcaacgaanacagagnggcaggcanaagggagcctgtgtgtgcgcaggaanngtngaatggacncacagagcangntntccatgtanagnatttcactctagtgtnacaagcatccgtgcgtcaataaagccaaaacaantngacacgngaagatccaacacattcanagtgcataacatttacaaaaatacacaccagcagcagncgttgntaagggctatnaattntggtacctagncaaacattctgccaccaaacaaac

SEQ ID NO: 1503 - DNA, 166 bp, Homo sapiens
  misc_feature (1)...(166): n = A,T,C or G
gactgaggtacctaccatgccaagcagtgcgctgataatttatgcaagcgaaacgcctatatgcataatgggatcctgacaccctcttncggnctctgaggatacngnnncgcatgagctgngcagacatacatgcgtggctgcgtataccaacgacatatgcaat

SEQ ID NO: 1504 - DNA, 285 bp, Homo sapiens
  misc_feature (1)...(285): n = A,T,C or G
gagctaagagggctgcctgagagcatnncccccgnacagttnaaggncanattncacaatgtntgaatgncatgcttganaagaggagaactgngtcactgncatctggnnnnttggacactgntaagtggnntcctactgngcccagggcagcgtccacaacacacantgcctgcccctaaatgctggnaacaccaaggctgaagaccctgaactggnatttccattcttatgctaggactcacactcttgcctaagaataatatgagacttaaaaaaaaaata

SEQ ID NO: 1505 - DNA, 270 bp, Homo sapiens
  misc_feature (1)...(270): n = A,T,C or G
gagagagagagagagtagagcatagagaagagtagtagagagagaggagcagngnaggnganactccttantgaatgttngnagggaggaccnnanaagcttngggnttagcatcacgaccagcattaaggacncatncncngactagccattccaagctttctgggcaggacttttccanacatagccagaacttgtncctgtccagaaaatcatgagattttggaaatcattaagcagttgaagacagaattcaaaataatataaaca

SEQ ID NO: 1506 - DNA, 549 bp, Homo sapiens; identical to SEQ ID NO: 14
  misc_feature (1)...(549): n = A,T,C or G

SEQ ID NO: 1507 - DNA, 523 bp, Homo sapiens
  misc_feature (1)...(523): n = A,T,C or G
ggtgaacgttctttttgagtccctccaaccctangggttaactcctttgagcaccccacccagtacataaacgcaaagggtacagccgagaagttttgaggacacacctacagcctggggatccctaacacctgttcgtgtggaaatgaactcccccgggtgtcttcagtgatgacctttctatcagatccacagagtgggactaggaacgtgaacgaacacatgggagcccaacctcgtaggaaaaaatggagacctgaaacaggtctccggtctntgtggctctggagcctgggactggcttttgagtggctcggggcatctgaacctcctacagggccagctgcaccgcggttgggttgcgtcctaaagacccacgatcctagtggaggacggcctcatttccggtgacagtggacttgaccagnctgcctctcctttggaaccgngcngcggnnccaatgccaattanctgancctgaaaaatgagtgcgctntncgctctccagggggacgcagggtg

SEQ ID NO: 1508 - DNA, 239 bp, Homo sapiens
  misc_feature (1)...(239): n = A,T,C or G
gactgaggtggggtctttcagatggctnagggggtaagagcacccgactgctcttgcnaaggtncagagttcnaannccagnnnccacatggaggcgtcacaancatncatancatgatcngactccctcttctggtgngtcgtgaagacagctnacagatgnacatnacatactnaatacatanatacaatggttannagnatgcggtaggtagcaacgnccatttataaaaaaaaaa

SEQ ID NO: 1509 - DNA, 203 bp, Homo sapiens
  misc_feature (1)...(203): n = A,T,C or G
gagcagaagagacgttctacaactgctgatgtactttctacaccgagagcccgcccgaggagctacgcgtccttgttttcataaagaagagtgatgcttttcctggaagggcaatggntacttctgggaatagaaaattagtttttattgtttaaccttcatggtttaaatgaggaagcttctgcagtggttaaaaaaaaaaa

SEQ ID NO: 1510 - DNA, 163 bp, Homo sapiens
  misc_feature (1)...(163): n = A,T,C or G
gactgagagacttggngctgattcgggtctctggcagtanagcangccgagccgccgncanactgagaganttctgnnnaggagctgatattcanggttactggactgcanctgttangntnaagcaaccttcagagcctgacgctctctccgggaaattgtg

SEQ ID NO: 1511 - DNA, 458 bp, Homo sapiens
actgaggtttctagaaggaaaggaccatgctgagtgcagccaggcctcatgggaggccagaactcagaagctcagcaatttgcctagacttggacaaggcttggctttctcatctctcaaccctgcgctgtggttggtgatggacaccacagaggcgaaccgagtctactcaacaaagtctctactttggtggatgctctgttcagggcaatgcgttggccttctcttggctgtgagagactgtcagatgcaagcaggaggcaaacgatgctgtggattcggagactttggggagaggtttccatttacatgatgggaataggctggacatgtaaatatggtttgagagaaattaaaccaggaggaaatagagtcagctaagccaaattgatttcatagcttggcagttcccaggtttggatactgtgagccaataaaataatggaaaaaagaacaaa

SEQ ID NO: 1512 - DNA, 365 bp, Homo sapiens
  misc_feature (1)...(365): n = A,T,C or G
caccacatcgcttccactttgtgaatgaagatgctgaggccgccagtggagccagtagcctgggttttccaagcatctctcatcttcaggcacacacactggaccacagactgaaacccttggtgccgtctcctctgcacctcccaagtntgcttcctgtatgaccagcccttgagatccgaagatgctagaaagatgaggttggggagtgaggtattttctacctatgccggcctggcacagcatcctcagctgcacgcatgagcgaatgccacaatgtgcttacatcagaacttctaaaagtgtaatgccctggtcacttccgggtgctgtcctgcagatgcctttaataaatgtttttattt

SEQ ID NO: 1513 - DNA, 329 bp, Homo sapiens
  misc_feature (1)...(329): n = A,T,C or G
actgagatactccgcctccatgaccgagtcacctgagatgaatgaagacatgcagctgtttagggattgtttggtttttgttttgttttttttccagcaaccttccagttcaattcttcaaaacacacagatactcaagtcaaactgtgaagacaagtattacatttgtctagttagaggctaatgttttgtacattttttgtatgaagaagtgatgtagccttgccctgatctttttttgtcagctttaatatatttatgccagatttttaaaaccaacaaaattttcctgttgntcaagtgtgcattgaagaatcacatttatccaa

SEQ ID NO: 1514 - DNA, 377 bp, Homo sapiens
  misc_feature (1)...(377): n = A,T,C or G
acgaccccaaggacttgcctctgcagngaggagggtccttcctgcccgggccatgcccgacacctacacagccatttggttgggagactccctaggattgccagtttnaaaagaatganntgncttcgtcctcggngtcacntgaccctgtcccatggtatccagttccctagagcacanatctgtggacagcagcctgtgtgacctgctgaaggaccccagtgcctcccnaaggagcagaccacagggctctaggcgagcaagagccagttcancgcatggcggtgtgtggcggccagggccaccggctgggtgcacagganggncangcantcttntcaggaggacctggtttcttcagtgatggccgtggcaga

SEQ ID NO: 1515 - DNA, 470 bp, Homo sapiens
  misc_feature (1)...(470): n = A,T,C or G
attgaggggactggagagctgagngagcgccagcttctccaganttggncttntcacaaacctnntctatgtttatgtgcattgagattctcnaanntggggattnganatcgcanncattcgttgnatacattntaatgacagggagcccacctacctcatatagctgnnctnacaagaggagcattgcttacatagnctngaggccngaagacacctgtcagaanatancntgacnctaataganggtgganangggagnggatgganttgcantactctacaggaggctgttanagtggaaattcnggttcaccagaaactggttggccaaatgatgaggatccacatgctgactcattgattnacatagtccttnatgagattgctangcncgatnactnccatcantantgacnccgggagtcgaggntgaagncncccccgnagatgcctaagacagctgaata

SEQ ID NO: 1516 - DNA, 199 bp, Homo sapiens
  misc_feature (1)...(199): n = A,T,C or G
agaaaaagccaggagagagacaacagttttttaanggngaagaaaaanccggctgangagaaggcncagnggngaagagcgcnaacngcacgcgagaagggccggaggtcaaannaccagcaagcacaggctggancagaaccatccgaaacgaaancagangcncncntccggagngcccgaagacagttttttgagc

SEQ ID NO: 1517 - DNA, 243 bp, Homo sapiens
  misc_feature (1)...(243): n = A,T,C or G
actggatggcagtgtttctccagtgtacaaggtccagggctgtggtaagagtatcttatttctaggcctgcttactgcagtactttgttacagtgttgcctgcaaagtctctctgttacaggttatccttttaccaactaaggagaagacactgctcagattttttttttaccgctgctcaatanatcttgtttatcacaattactactacaatatgttngcttaangatgataaaaaaaaaa

SEQ ID NO: 1518 - DNA, 173 bp, Homo sapiens
  misc_feature (1)...(173): n = A,T,C or G
gcatcctttatgtgcctcgtgccccctgnggtcataagaggacatatnaganggnaactttggaagtctcaagtagaagcgggncagatggctcagcagccatgcattgngttccctttgactatgtggnaacaacatttggagtnatntaaaacctactgaagtgccaacat

SEQ ID NO: 1519 - DNA, 179 bp, Homo sapiens
  misc_feature (1)...(179): n = A,T,C or G
ttaagtatatgaaaancctagntcttttcaacaccaaacacgcagggtntcaccttnttcgngcttcanagnganagnggnntggatctgtaatctctgaatggatggngaagaaagtgagagccnttnaggacagcgggancaaaggttacnactcacctgttgatcttctggggttg

SEQ ID NO: 1520 - DNA, 194 bp, Homo sapiens
  misc_feature (1)...(194): n = A,T,C or G
tggtaaatgccggcagggncatggngttacncaccatctaatcatcatatctntggcagtgaagaggctacnctatatcttatgtgagcttnnantaccagctntggatctataggagtnnnatntcaataactcaacngggctacncnttctccngnncaagtagaagtcttcttgacgtactaaaaaaaaaa

SEQ ID NO: 1521 - DNA, 183 bp, Homo sapiens
  misc_feature (1)...(183): n = A,T,C or G
tcctgtcccagggaatcggtgccctcttctgacctctgagtgcaccagagagnnccttgnggccagggnngactgcctgnctnagaggntgcnggagccnanaccaatgcctgnccacnggatggacggncgtctcatgnngcccacactggcttcnaacttcctanattaccacggatgagt

SEQ ID NO: 1522 - DNA, 194 bp, Homo sapiens
  misc_feature (1)...(194): n = A,T,C or G
gttctgaggaatcttagaagctttangctgttgtctctcaccaaacactcaagatggagaaggcatatctccataagacttctgtggagtgaggaaaaccccaagactcaccagatatccaggaagtttcacaggactccagccaaaacagcagtgcttggtcttagtaggacagataaggaaagaaataaaaa

SEQ ID NO: 1523 - DNA, 312 bp, Homo sapiens
  misc_feature (1)...(312): n = A,T,C or G
actgaggccttgcaaagcccattgggctggtggaggggccaggtggcctgggccagggaggagtggctgccactctgcaagatgacagccaagagaccgagggcaagttcgaggactttgggtacaatgcgcagctcagtgaccgcatctccctggataggaccatccctgactacaggcccaagagctatcgctggngtgtgagtaatgatattgctcagtgagcctccagtgtctgaaaggtttcagcagtccttcagagggtggggccatcttgttccttaccacaaagatgctcactgctatgacttc

SEQ ID NO: 1524 - DNA, 382 bp, Homo sapiens
  misc_feature (1)...(382): n = A,T,C or G
gcacccatgagaccagacngagcatccccatcctgctcccactcnctannccagggcataaaaccagcccccctccccagaccccactgttctcagttcttccaccacttccaaatgtgcctgggtattcaagtgcctgggaagtctagagccccagcctcttcgaaggctttgcctgggaccaggccccccactccctccccccaactagctctggctgtcttgtacctcagactgctctttcccaccacaagtagtgctttggcactttcctacaatacaagcccagtttggcacagagtgcagtcaaactctgngttctgtatcctcaagctgtgaagccctgttgcagagtggatgcaggactcacaactaaggaaaa

SEQ ID NO: 1525 - DNA, 227 bp, Homo sapiens
  misc_feature (1)...(227): n = A,T,C or G
aaccctcgcgtgtgagagcgcgccaagcngtgtaccagaagctccgggagctcngcagggaagacagcgtcggtcnacanctttgaanacggacagaagattccgccananatggggatgaatgnatnnnccgatgatnacaaccatccactggagnngccngagagaanggntgcgcanagcncagaccttttntttgcanaccctncttacctgcgtgaggaatg

SEQ ID NO: 1526 - DNA, 233 bp, Homo sapiens
gaactgagcatgcaatacggatcatgctggccaaatgagtggctccctccatgggcaaggaagacagagcaggatagttcaagactccacccttgtcttcagaatggcaatttaaaatgtattctacgctcgcgatgctgttcctgtgattctcacggaagccgcctcctccctcatcttctaagcaccctttctcacagtcaataaatccctctcttccttaaaaaaaaaaa

SEQ ID NO: 1527 - DNA, 346 bp, Homo sapiens
  misc_feature (1)...(346): n = A,T,C or G
ttactgcggacccagggacncactgagacagntcntggntgncnccagngacctaagactgngntcccccacccctggcagcaggagtnnagnaggtctntctnntaccccagatacattgccangcaccatgcatgagggcccaagcatnctgngacananggaggganctganccacatacactggngcnctgngnaganannncncggntgagtacagagngggtatcatttggncaccctgtcactcatttccccccccaccccccgactgtacagctcagaaagaaaacaccaggtgacctcctttaagagtaaaactctcatcttccttaaaaaaaaaaa

SEQ ID NO: 1528 - DNA, 450 bp, Homo sapiens
  misc_feature (1)...(450): n = A,T,C or G
acatacccattgcattcctggctacatgagagcacaggcagatgccgccacnttcgctttatgtggaaccagaggcanaagcntaggacattttgaatgtaaaacatccactctgtcaactgaatcccttagcccctgcctacctcagcctccagaaccatgagagttacaggccttgggcaccagaactggctttggcatgtgcgtttgttttaccggnttcaggcccaggggcaacagagccaaatgaccacagactgaaatctctgcaacaggaagccaaaagacaactttgcttctttatgttgacttcccttagnttgtcccanctctggaaaacttgattgacacggtatgacccggtaacaattaccatccactcgatacagagaatgtatgtancaaacattttgcatgtagnatngcgcacgtagaaatactgaaatagct

SEQ ID NO: 1529 - DNA, 163 bp, Homo sapiens
  misc_feature (1)...(163): n = A,T,C or G
aactgaggtaccaagatgcaccacagtaggncattgggcatccctggaactgngagttacaggnggngtaatccaagctgngggcattatgtgactgaaccngaacctgngccatctggaaaaagaatatgngctcttaacattccngagccatctccagcgt

SEQ ID NO: 1530 - DNA, 323 bp, Homo sapiens
  misc_feature (1)...(323): n = A,T,C or G
gcccccagagccgcaaggcccaatgangnggcccaggcgctggacagccagggaccaggagcngannccacaggcaggngcacgagcgccanagganggaggaaaanggggcccagggnaaaggcggaggngacgcggagcgaagaggcgannaccgcgannncncngaagcctggcttcnaagacaccgttngccaccgcancnggagcnngcnnggctaccccaggatgccagaaggnggcagcgggctggaccccacagangcgagncncaggccggacacaacaaanaaagacccnagggggagggcaagaaaaaaaaa

SEQ ID NO: 1531 - DNA, 276 bp, Homo sapiens
tgcctgtctccgactctgtccctgagtcttactgttctagggctcaaaaatctggaaatttgtgctgattccctccagggtcatagccatgcctgttccaaggaagccctagcgatgtctgtttcccactgcttcctgcccaagatacctggtaaccctggaaggtagccctggtgtgggggtgctgtcagaagcatggacacaattctctctctccatgatgttagaatttcctgaataataaattggcagtctgcatcccttgaaaaaaaaaaa

SEQ ID NO: 1532 - DNA, 189 bp, Homo sapiens
gagggacccctgacaccgcttctggcttcctccccacccctgatagagaatgcacaaagtgaagaaaaacggggctaggatgtacctcagtgatgggagtccttaccccaatccataaatccataaggtatgaaccccaacacctcagacattagaaataaaaatgagaaactaagttaaaaaaaaaaa

SEQ ID NO: 1533 - DNA, 241 bp, Homo sapiens
  misc_feature (1)...(241): n = A,T,C or G
tgaggtagattttggtcngnggccatacattacttcttgcggaactctcattaggtcggacaggaagcatggntggntncatattcaaaaaacatagttannantgantacncngaaacntcaacagaagngntacgccgaagcatctncgctaanantgatgacatatgttacctnttgatgttgctgaagntangtactgccatcctcctgtatgnnataatgcctacgttatatacta

SEQ ID NO: 1534 - DNA, 174 bp, Homo sapiens
catgaaaagaaaacccaagcaaaggcagagggtgttcctgctcctcctacagtgcctatgaaagggggggaggattacagagccccccaacctcccaatgctgctgtctgaaattttaggtgaggacccccaagcaatcacatgtcatgatttttatttttcaacaaaaaaaaa

SEQ ID NO: 1535 - DNA, 249 bp, Homo sapiens
  misc_feature (1)...(249): n = A,T,C or G
gactgaggtggggtctttncgctgnnaggaaatgtggagaatgagtcagaaggatggcgcggccgtttcattctgacacttggaaggatattgtgtgtgtcgctttaatgaagtgagcttcagcagcgctgacagttattatctgcatgaggaagtcttctccagtgttttgtcatctcagttttctgcatccaactaaattaaaaatcagtaatgtaatgggacagagggacaagaaggaaaaaaaaa

SEQ ID NO: 1536 - DNA, 223 bp, Homo sapiens
  misc_feature (1)...(223): n = A,T,C or G
gcggaggaggtagctcgaaggctcctgcaggatnnccgagaagctataaatcnntccngaactggggcagccccttnnattcttaccggncagngnngcctctactgaacttccggggncacttgtcatagtgcgtttaggctggccgatgcttgtgngctttagagggcaaccctggcaggaggatgaccttaaggagttatgctgggagacaggtagcgat

SEQ ID NO: 1537 - DNA, 162 bp, Homo sapiens
  misc_feature (1)...(162): n = A,T,C or G
tttgctattttgttagagnctttnacaccatttgtctccacacctccgcgttacatnaacaccaataacgccatttaatntaagcngcntcaccancattttctggcgttagtccaccagctaacatanaatgtangctctnggngctctcttgcctcccaa

SEQ ID NO: 1538 - DNA, 170 bp, Homo sapiens
  misc_feature (1)...(170): n = A,T,C or G
ccccattcccactattttgtccgcccacatcngtggagctcccaaggagttcgcaancgtgatcttaaatccaagtgtncaggancnatgttgngtcctcanacggnaaaggnaganatgtgaccagacacagaccaangaaggggngcccaaataaaagccaacctgaa

SEQ ID NO: 1539 - DNA, 268 bp, Homo sapiens
  misc_feature (1)...(268): n = A,T,C or G
agaatatcttccactactgncanctgnagtataacttgcaatgtacacatatattacggatgctgttctattaaatgctncctatattatatatatangtaatgtcggntgatctatggngcactntcagnacaatctgttctgatgccgnatagttaagctagccctgncacccgncnacacccnntgacgcgccantgacngacttgnctganaccggcatnngntntacagacaagcctgcnancgactcagggatcttgtatgt

SEQ ID NO: 1540 - DNA, 276 bp, Homo sapiens
  misc_feature (1)...(276): n = A,T,C or G
ttttgtccgcccacaagggttaggtgtccatgtagtgacaacagggtggggagacaccttcccacataaattcattctaaggtactgtttcaccattgtggagctcgagaagactcgtgaccaacaaccacaacctgaacgctcagtagtacacatggtccagcttctttttcttggtctagaagctgagaaccgataaacacagnggctaagttataggagagaagtctgtcaaagagtgtttcagttggagtttgnagacggcaaaaagttgtg

SEQ ID NO: 1541 - DNA, 238 bp, Homo sapiens
  misc_feature (1)...(238): n = A,T,C or G
caactcccactatttttgnccgcccacacacacaggccgcanaatgngcnctagantccgatgctgacttgctgggtattatatgtgtgcccaatagaaagagaacaattgacccgnntattgcaaggaaaatttcaagtctngtaanagcatntannaatagnttnaggcactccngaaataccntnntatggcgtgttncgcaatcaacctaaggagganggtttggcatctgggg

SEQ ID NO: 1542 - DNA, 151 bp, Homo sapiens
  misc_feature (1)...(151): n = A,T,C or G
gtttaaagccctgatagcctgtcctcccccgatccatcccattgtcaatgcccagcatcagttgcagntttctgntccttcattccttctatgtctttaccaaatttcattcccatcaacntgtatcctctcccttgtctacttagctgtt

SEQ ID NO: 1543 - DNA, 193 bp, Homo sapiens
  misc_feature (1)...(193): n = A,T,C or G
ccaactattttgtccgcccacagcgaacatataagatttatangtattttctgcttatttngaacctaattttgngngtctatgtgcncagaaagaaatttatatatattaagaaanatctangaatacatagaaacatcctnctnatgcgnttttatcaccattctntcaaaangttactgttagcagtagt

SEQ ID NO: 1544 - DNA, 161 bp, Homo sapiens
  misc_feature (1)...(161): n = A,T,C or G
cccactattttgcccgctccacactancgtagnaatactagtagataaacataaaaaatgtnnaggtcgaggntagangcangttcaaggagcgaaaggtggatgggtaggttatatagggatatagcanagagatatatngcaaagagatacttttgagc

SEQ ID NO: 1545 - DNA, 168 bp, Homo sapiens
  misc_feature (1)...(168): n = A,T,C or G
ccaattcccaactattttgtccgcccacattggagctccaccgctggtggcggccgcggnattttctccttacgcatgtgtgcnggtatttcacaccgcatagatcggcangtgcacaaacaatacnttaaataaatactacttagtaataacctatttcttagcatt

SEQ ID NO: 1546 - DNA, 229 bp, Homo sapiens
  misc_feature (1)...(229): n = A,T,C or G
cttccccccactaccnaactattttgtccgcccacaggcatgtaaccattttagttcttttaaatcaactaaagaaagtataaggatccaatggcaaagctcagcctgntctcaaaacgaatagattnggggataaaagacaanntgnaaatcattacanganangganaaaganggaagngcgngctgtgtnctgtatantaagctcntgggaagcatgactggggca

SEQ ID NO: 1547 - DNA, 162 bp, Homo sapiens
  misc_feature (1)...(162): n = A,T,C or G
gtcgctgcctgagccctgnncnnccggctaganggtggttccgccccagtccnnantcgctgctgtgaagnngtactgggnctacggcagcttcncgccaacacctcntcgctgcctacnagcgaggccatctgcgtggccaggcgcagggcggcgtcagga

SEQ ID NO: 1548 - DNA, 217 bp, Homo sapiens
  misc_feature (1)...(217): n = A,T,C or G
taccttacactcctcgccaaggtggctcagctcctcctccatacctcaatgacagtagcccaggatatgacctccagagcaaggctgaggccacatttcagctctgtactctgtcagctcggagactctgagacgattccttantcttatttcttcatctgtngaatgggttnctttgaacnaacagcgggaaaattaaaacaaccatgtgtctgta

SEQ ID NO: 1549 - DNA, 546 bp, Homo sapiens
  misc_feature (1)...(546): n = A,T,C or G
ttttgagaaacgtctataagggtnttgagcttcaccctgcagctcccgtttccagagttccagctccgccancttctccacagcaaactacagggaaacaaacagggacgcgtgtggtaagcaagggcaaacagctaagaacaactgcggaagagtgggcctcctgactagaactcctatgacttagccgcagaccctgtggggatggatggatggataccaggaagaaacggccttacagagcccacgttgcacctgggacagccaaacactctaaacactggctggaaaaacagtcacagtggagttggatgccatgaattctatagcatcctgcacagaaccagaacttcatgcacctgactgtgcttggtactgctctgcactgagagatggcagcagcctctgggttgcagttgcaccctgggtggtatacacagcccctgcctagcaggcagaaggccttggtttcaaagcagtgaagactttgattggcnagtatccatccttgcctcccccccagggcagcnccacgcaagagaggct

SEQ ID NO: 1550 - DNA, 202 bp, Homo sapiens
  misc_feature (1)...(202): n = A,T,C or G
acagggcttgcgtttgcggccagacgnccgtatcaaccagcaaaccgggcngcggnacccggacgtcttccagcacgctntccnagagtcggnggagnaaggagaactttgnngngtaccgtgatgcattccaacttggatttattcgtcttcatgtnntantgtcagtgggatcgaaggngctccccgtgttgaaagactg

SEQ ID NO: 1551 - DNA, 231 bp, Homo sapiens
  misc_feature (1)...(231): n = A,T,C or G
tgaggtggatactgtgtcttcacaaggnttcttaaagtcaagagagatgggagacaagaggcagaagatggtgcattagaatgctcagttggaggctgtgtcctggctttgaagttggaggaaagagtgttcgaacgaggaatagtgcactacctaaaagaggaagaaggcaagacagtcctacccatcttgttttcagccacataaaaacccctcttaaactaaaaaaaa

SEQ ID NO: 1552 - DNA, 223 bp, Homo sapiens
  misc_feature (1)...(223): n = A,T,C or G
tgagattacgaccaggantgtagctctcaaacttgctcaagaacgagctgaaatagttgctaaatatgacagagctggtgaccgctgtgtttaagtgaggcatgttgcgacaatagaccaggtggattttctgttgaatctggtggagtagaaacgggaagcacacatctctctagagtcaggaatgacataggaagaaatcctgtctcggaaaaacaaaaaa

SEQ ID NO: 1553 - DNA, 202 bp, Homo sapiens
  misc_feature (1)...(202): n = A,T,C or G
tgagttccaggatgaggccganangagggctaaggngagagttcgaagagctggaccaccaagagccaggnnatcactgcccttgtggaaaagcagcctatgaggccgtgtagaagacacagngtggagtgacagaaatcttgctcatttcactgagtgtattatcatggatagcaatcttccttccctgcaaaaaaaaaaa

SEQ ID NO: 1554 - DNA, 354 bp, Homo sapiens
  misc_feature (1)...(354): n = A,T,C or G
ctgaggtacatttccataaagcctgntaatcgaaaattggccaacggaacaaatgtcttgggcctactggtggacactttattaaaggaaggctttcatctggtcagcactagaacaccagcctctggagaaaaaagtgaatgctatgtctttgaaaggataacaacccctcaagtccttgggatgagtaaaacacccaaatcagaaactaccaccatgccagcgccgtctcagaagtgacactgttctttggacattccatatcggggactgtctgtcagatctgtactgtgtaactttgggttcctcgagcagtgcttaaagccacactgcctcttctctcaaaaaaaaaaa

SEQ ID NO: 1555 - DNA, 160 bp, Homo sapiens
  misc_feature (1)...(160): n = A,T,C or G
gactgagaaggatttttctgtgttgccttggctgttcgggaactcattctgaggaccaccaggctggtcttaaactcacagagattcacctgcctctccctnctgaatgctgatgctgggataaaaggngngcactactatctggctttaaagaaatgtt

SEQ ID NO: 1556 - DNA, 239 bp, Homo sapiens
  misc_feature (1)...(239): n = A,T,C or G
caggggccttactactacctntngggtaaacgcggnaacgaactanggggntttttccgagaggctnaccnaggnggggctttctancgttnntggggcaagggaaagtttgganggaaatncctncgggggagggaaaggccgccttntttgaaactcgnaaantaaccnaagggnattggtaggccnttgtttcaaggcnttcccntttaatccccaangctttgccaatggccttt

SEQ ID NO: 1557 - DNA, 203 bp, Homo sapiens
  misc_feature (1)...(203): n = A,T,C or G
cgcccaacacatggctcacagaaacccacagctccatcaggagattgttcaggcttggagggaagatcattagactggttctgtatgaagcccagaaagcattangaaaacagataaatgtcanaatgcgtggttgatcaatttcaacaccttcagcntctgccttcccaaaggtaataaatacatttctctaaaaaaaaaaa

SEQ ID NO: 1558 - DNA, 250 bp, Homo sapiens
  misc_feature (1)...(250): n = A,T,C or G
tatgctgctgtgacaaagtcggagcatccactgagacaaaggagtgactgccacaatcttcaaaccaatatgggtcagtaaactctggcaccggtgcctcgcgggtccttggccgncggaaagcaccggtgtcggntcagcaagcacaccctgggggtctcggnatctgnaagacancagaacccctctttntcggacccttgtaccttnttctngacannccnnccgtccgccttaaaaaaccctttca

SEQ ID NO: 1559 - DNA, 177 bp, Homo sapiens
gactgagacctccctgggttgctcagatcacacaggcctgctttgacactccagctgcagccaaccctcccaagatccacactgaccgagtcttcctctcttcatgctgtctacgcagaccctaactggaacactaagaggaaactttggctggagacctgtggctaccggtgatga

SEQ ID NO: 1560 - DNA, 190 bp, Homo sapiens
  misc_feature (1)...(190): n = A,T,C or G
ctacagattgacatctaggntcaagcnttnggactttgtnttatctgtgggacatacctcctgagggccccaccttntggaagacagtgttgatgnggctganngaatttacaagggcaancaaaaagatggagtgctattgttgggaacaaataaaagaaacttattctaagtaccaccaaaaaaaaaa

SEQ ID NO: 1561 - DNA, 270 bp, Homo sapiens
  misc_feature (1)...(270): n = A,T,C or G
gcgccgtgttttctcnggngagccgcaacgccccgngggaanaggaggagccncgcacacagacgttgctancaggagnaaagatcagccaggcggagaatgtggaaaccatcccaattactngggaaggggaagcggaaaaggancaggggaganttgccangaccnaaatgntttttttacaantatccccagacccagggaagctgacacccccgcacggatgngcatangcaagcaaaacaccaatgcatatcaaataaaaataaa

SEQ ID NO: 1562 - DNA, 223 bp, Homo sapiens
  misc_feature (1)...(223): n = A,T,C or G
aggtagcctgaagaacacanctttctgtgtttagcagtcttttcccctcctcctgtnctncatttnttctggcactagatagcaaacctaaagnctttcttaaactaggaaagnttacgtaccacagagcatatgccctctagtaacctgttttattcatctttgtttaaaacagggtgtcaccatataaagcctaggatggcttcaaacgtgaaaaaaaaaa

SEQ ID NO: 1563 - DNA, 397 bp, Homo sapiens
tctgagacacggcctagacaaaattaagagttatgaatacaatagaaaacaatggcccttgccacatcagcaatctgcaggaatatactgtaccattgggaattctggatttcactgccagcacgatgctgagaggctgaccatcacacccagcttcatgtggtgtgactctgacctctggagggaagacgatcgaaggactcatcaggctgtcgtggaggcactaatgttacagaaccagctcgcagcagaagctctggacaccaaaccttgggtgaagtcctttagctggcactgtccctcactggtgctgagaattaactactgtttataaagctctgagtggagaggggatggagttcgtgcctcgtccctcctgatccctgaaaaaaaaaaa

SEQ ID NO: 1564 - DNA, 241 bp, Homo sapiens
  misc_feature (1)...(241): n = A,T,C or G
aaaccgggggcaacggatggcagnaaaccacaggggagntttgccgggnacgcgaancccngacttccgcaagcnagagnnngaagggcccgnaaaggcangagccacccnnccnggccgagcaagcgggggccgtggtnaccgaccaagataatcagncaacgtgngacaagcggaggacaagaccaaggagacancagcangccagactncacnaccntctcaggaaaagaacaggcgc

SEQ ID NO: 1565 - DNA, 225 bp, Homo sapiens
tgatctggtatctcttcacggcagtagaacattggctgagacagtactgtagcaatggagccagccaactgtagactgaagcctttgggtctaggagccatgtcaagtctttccttatctcacgtatttggtcacagcagcaaaatgctaaggagacatcccctcttgatccttactaatattttagttttcaccacaataaaactatagacaaatcaaaaaaaa

SEQ ID NO: 1566 - DNA, 161 bp, Homo sapiens
  misc_feature (1)...(161): n = A,T,C or G
gaagcaaaagacatttttnctcnttaagaagaagcagccagncgcgggtggangaagatgatgaagatgaggaaatagtngacatgccgnacaatccggtttctggacngacatanngaaaaatgccagtganagtanactctcaaaagataaacgtcaga

SEQ ID NO: 1567 - DNA, 322 bp, Homo sapiens
  misc_feature (1)...(322): n = A,T,C or G
tgggtaacccctgctctganttncctggggctgactggcatacactctgcctctgtctggagtttataatgaggatgcaaatacagggattcaaagaagaggccctaagtgagaagcccggggatttgctaaccaggggcagggtaccagtcgtgactttgacctttatagccttaactcactgtagacaatnctgcnttntccatttccactccatccctgtttctgggagagaggtgctgntgtncccaaggttactgctctctggggatgagggtcagnatcacaaaccaaaaccttaaactttctaaaaacgaaaaaa

SEQ ID NO: 1568 - DNA, 506 bp, Homo sapiens
  misc_feature (1)...(506): n = A,T,C or G
gactgagaacacgggaccatccttaccaacaccaaagtccaggatgcaggagctattgaaggcatgagcacctggatggacctggagcaggacatgctgtctacgcagaaaggagagtcggatgtcctgcatttggtggtgcatggagatgggagcatcctgagagaggcaaagcatctgagaaaggaaagccagacctgaactccagagtcgctcaactctacatgcaattattccatgggatcattcctaagagagccaatttactcttgtcaccactgaactgctgaggatggcaacaaggtacagagaaccaaaggtganatannctanctctgatnttgtgagtanccattctgtgatggccaccagtngaagacacccaacacgacttcncaagcntanctcccnttattgnatangnaagnnnaccntncnanncntgactgtctctnttcntcnngntagtcttanagaaaggcncgttcttctatgggctccatcac

SEQ ID NO: 1569 - DNA, 203 bp, Homo sapiens
  misc_feature (1)...(203): n = A,T,C or G
tggagcctggaaagtcctgctcagagcggccctnctttcctgggncnaagcgnatnaattgntggnattgggntttggaatactcatgacccctctggggtgaaggtnangtgatntcaagcnganacagtgtgncctagtacctggcagttgctgnacggaacancgnatccttctccaccctggcattagttatggctgtc

SEQ ID NO: 1570 - DNA, 192 bp, Homo sapiens
  misc_feature (1)...(192): n = A,T,C or G
gtagtctgcgggttggcaaaggaaacctggtgattgtgaaagggagcctgggatgaacaganatgaggaagacttgntgacacggcnttctacattggaacatganatnctggggtngtcgacatntgtgacatgggcatgancattncaaannggctccaaaataaactgtcttttattccctttaaaaaa

SEQ ID NO: 1571 - DNA, 170 bp, Homo sapiens
  misc_feature (1)...(170): n = A,T,C or G
aactgagagaccctggggagaaggacaacaacaagaatgagtgagtctctggtaaatacaccacaggaantcnttgcctacatagganagtgatgcgttgngntcttgactgaagnnaggcanntcntctgaccatgagctcagtgganantgtacatgggtcgttgata

SEQ ID NO: 1572 - DNA, 222 bp, Homo sapiens
  misc_feature (1)...(222): n = A,T,C or G
gcttctacggggaaccccgggcgcccagggaaccctgctnatatgcnctncagcacaggagaaggctccatggcctnctgttgttcttgctggtcgagagcagacgctgacatatggtggcccgtacggngaaccgaggacaacgacctngtggattnanaactcttnanccagggaatggtggtacnaaagcngttnagacagattagaaaatttttacgg

SEQ ID NO: 1573 - DNA, 231 bp, Homo sapiens
  misc_feature (1)...(231): n = A,T,C or G
ggtaactccagtgcctggatntgacnctctgaattctgctgncaccaggcatacggtnaggtacacattnatanatagagacanaactattcgtanaagtcnnataaaaacgngnttgagcactanncatnatgatgnnacaaagcaatacanngaggtacacgatanatttataaagacaaantatttgtataagtcaaataagaaacgttcttgagcaagaaaaaaaaa

SEQ ID NO: 1574 - DNA, 328 bp, Homo sapiens
  misc_feature (1)...(328): n = A,T,C or G
tagcagttgtcctgatcctttgaaganaaaaggaacggaaatgatgcnatcgtcgactctatgcactgcactaacattctgcctattgagagctttcacctacatggtggcattttcctgataggactctcatgattcttcattctgaagaatgagccaagaatgcatggaccatggaagagctattttgaatgcagtgagagacagagctttgacttccttgtggaccagtgtgctcataagactcatctcagtgcanagggaaaangctttccacaaanagctgnaatgtatcccagatgccaggctgacctgcggagacacacct

SEQ ID NO: 1575 - DNA, 404 bp, Homo sapiens
  misc_feature (1)...(404): n = A,T,C or G
atcatacctgtgcattaaagtctccatgaagaaaaggatgggcttcagagagcttctgcagagtttcacatggatgttcctggagagcggcacacccagaaaggacacagaaggaacttctcagaggccctgttgaaagaagaaaggaaacttgagtttggtgttcctacccaggaatgaacnttggcaaggcaggtctgaggctggagttatgtgcctagaaggagtcaaggttgctgtttctgggaatccaattcttcccctgggctgtccttatcagtcctaaggcagctgatattctctttgccaatgttgtgtaatttagctctctgctgaccttggtcatttccccctgaatatagtatataggaagctgaacttaataaacatagcttgtgccagtc

SEQ ID NO: 1576 - DNA, 235 bp, Homo sapiens
  misc_feature (1)...(235): n = A,T,C or G
ctggtgtacatctcaggatggcatgcctaaccgtnntanccggntatacanccangatggcgtgnctaacctcancgcctgctctacatccaagatggctncctaacctccagccatggcttccaaattccagncaagagaggaacacatgccacccatcttccncttantgacatcctttggaaaacaattgatatcacattgactgatatttagtatttataatagagtctgg

SEQ ID NO: 1577 - DNA, 481 bp, Homo sapiens
  misc_feature (1)...(481): n = A,T,C or G
acgcaaacgtacctgttctgcaaggnaaaacctcgtctgctggtgtgaaaagccagctgtggccgaggaggagatggaaaagctgcgctgtcaggacacactcatcaacactaaacctgacaaatgagcaaggagccttctgaggccagaggagaccaagattgacaagccactggcaccatgacgtagggggaagcgtgtgtgttctccatgcaaggagatgagagcctttcaaggtccactgttgtctgtgcagtcgacataaattttgatggagatgtatcaacgtgatttaccaaaaccatttacagctgttcagttggagggaactgggaagcgattgcggagagaacccaggaagcctcatgctcatgagtgaaaatgactgcatattttaaaacttctggagacacacaatttccctctaatgtggcaatttttacttttcgttcgcatcgtttcagctgtgaagaaactacag

SEQ ID NO: 1578 - DNA, 193 bp, Homo sapiens
  misc_feature (1)...(193): n = A,T,C or G
catataccgtcgccantggctaccggnnacannaccttnttaattctttgntgangtttgtggtcttctgagatgaagcacaagagaagcttctccttaggctaagaagactgacgtnctcccaccgngcccttctgctgctctccgctttcatnttagacctggagattaaaccttgtgagcatatggcaag

SEQ ID NO: 1579 - DNA, 174 bp, Homo sapiens
gactgagtgcgctggagggaaaggctgcctgctgactttcatgataacagccccgtggaggaggattttacgtctgcgttggtcaggagtcaccagaggaacagaacagacagaatgatggctattaaaaggaggtttctcagagcgcttatgtgacatacatgaaaaaaaaaa

SEQ ID NO: 1580 - DNA, 287 bp, Homo sapiens
  misc_feature (1)...(287): n = A,T,C or G
gactgaggtgggttctctgcctgtcatctgccagcngncntgangactcccagcagaaattaactcattgagggctnangtgctggcaattacgnaggtttctgagggctccatcgnagtgagacacttnctctgcctntggtgactggatctacctncatngaggcnacaagtnaacctnaagttccttaacagtnntagaaccatgaatattaaggtttcttttacttctttgttcattcaacatattaaagtgaccattttgtggaaagaccataaaaaaaaaa

SEQ ID NO: 1581 - DNA, 490 bp, Homo sapiens
  misc_feature (1)...(490): n = A,T,C or G
tgccatgacatcatccccatggngtgaaactcgagaagcgcagtgggaagtgctggaactgattgatctgtgagctggtgtccatggaggctgaggggccagcctgagacaacagctggctgtgtctctcaccagtgacagggacaggagctgcatgctgtcttcattcagcagtctagaaacctggaaagaaaacttgtaacctggaaagggacagaagatgccatcttcagggagcacagtaggttccagacttgatcagccatcagaactggtaaagagcaacttggtgcaagctcaagctgacacaatacaganagaccgcatgctacagaannnnngnactnaagacnncancccntnnacnctcnngngtgctncttgnngtgtgagngannnnntgcntancangnngaggacnccngangatgagnccntggnnntcctnaagactctgggaacctcactcttgcttggggtatttttggaa

SEQ ID NO: 1582 - DNA, 153 bp, Homo sapiens
  misc_feature (1)...(153): n = A,T,C or G
gactgaggacggaaatgaggaagtaggaagaagataccacagcttancgcgtttcggtgggagtacatcagcgcaaacggacctcagaaactgccgtaccccctgatggtgctggaccggtgactttgtgtctaggaaatattcagtaatttc

SEQ ID NO: 1583 - DNA, 547 bp, Homo sapiens
  misc_feature (1)...(547): n = A,T,C or G
gactgagaatatgagagcatttaaccaagaatgtgagcagagaggtncgnttccacattcangacaacctgacagagattccaagtgcctcagcctcctctcccanggagttccagntcctttccntncacaccaacttncttccccccgnccnccaagacatctaagcatctattttgaaccaggatctgncctaaaaaactngnnaacacancatgtaacagaggcaagaaccctacactctngaaacttancacacggaaagaagacnaanatttntgatgacagatgctatggagtgctatgacatcatgacnagatggagggaggcgtccacctaggaaatcctcctcagatggaaacattcggaattcnncctcaaatcgcaaggggcacacccttcaaagcacanacccaccttatacatgnaaggcccttagtgaacatcatgtctnaactccttttanntgctggtgagaaaataaaggctcantgacaccaagacaagaaanaaaggacacaccctgacttcagccatatcaacggc

SEQ ID NO: 1584 - DNA, 180 bp, Homo sapiens
ttgtcgtagttgtggctaggccagtggcatccttcatcagcatccgtgtggtacttgttcttctggcgtgcagaaagcaaaagaatggagccatggaagcttccactgggatgtcagagtctgggaggcaaggcagaatcttgctgctgagctggaaccctagcagacagcaccctggct

SEQ ID NO: 1585 - DNA, 255 bp, Homo sapiens
ccctctgccttccgggaggctctgaaggagaaactacagacctgccggccagactttgctgacaccagcttctgggatcccagactgagtaacaaaagcagaaagccagctgagcatcaccacatctgttgccaagctgtggacaccatgtgaccagctgcctccagcatcctgctggcatgactttccagccttggtggcctgcatcccccaactgtaagccagaataaatccttcattccttaaaaaaaaaaa

SEQ ID NO: 1586 - DNA, 504 bp, Homo sapiens
gaggcttaggtactttcctgagacttctacttcctgtacaaagaaggtgcttttctcgcctccccacctgcctgcaccatgcaaacccttctcctaagacacccccactcagccctgggatggtggttttgaggggtgcctggtgtgaagaggaatccccccacctccacttagttctcttcagaccacagacccctctaacaaggtgctgctccctggctgcaagagaagggcccctggcttggttcactggtgagagaggagaaagcagtctgtcaactttagctttggtgtggtgacacatgcccagcactttggagccatgggcaaggaagatcacaagctccggcttgacagacacactcaagccctgggcagcagcctagtattttgggctcaacctcagacctgctgagcagaaagtgaagtcttgatgagtggcccgggagggagtgttgaaactccatcaggtccacctttgcagctgcgctcctgctgaccaca

SEQ ID NO: 1587 - DNA, 153 bp, Homo sapiens
  misc_feature (1)...(153): n = A,T,C or G
taaactggcattccatctttgttaacanggaaatgngggggatcgtaagatattaagcaaataccnaattatntngnaacatttncaggagnagtaacatnnaggtttcgatagcaatccnatcttccctgtantggtaccatcatgctgtaa

SEQ ID NO: 1588 - DNA, 205 bp, Homo sapiens
  misc_feature (1)...(205): n = A,T,C or G
actagtgaaatgcagagcacccgngaagccttcccntactgccnaaaactaccacacttatcacatcangaaacctgcnactatgngctaaaatatcaaccccagggagtcttacccacatgnagaccgcctactngccatcaaagnactacacccaangcnaagtgcttcttccaaantctacccacacatcaaccatacatga

SEQ ID NO: 1589 - DNA, 299 bp, Homo sapiens
  misc_feature (1)...(299): n = A,T,C or G
ggcaagaggggcagcanaggcanagcgacgcaaccganggaaaccccggcaggcagcanggcagnccacccantagacccaagaacaagcgaggcangaanccacggacccaganaanaataccccccgcgggnagcccacgnacaacaaggaanatccccananccccccgaatggattggggtaccaaaagggaacggtagacaaccanacggcgcnacaaagggggatgaggnacangaaccaacccnnngaaaggggaagaacccccaaaatccancaaaccctggaaagaacga

SEQ ID NO: 1590 - DNA, 218 bp, Homo sapiens
cctttgagggatgagtccactgaagtcaggaaagcgaatagccagaggtgacagagcaatggaaaccctgactagagctgggactgtaattgccgcactcaagagatgaagccatcagcatgaggagttcaagcctagcccaaacataaagtgagttcgagaccagcctaaatctataagaccttgtcttaaataaataaataaataaataagaacat

SEQ ID NO: 1591 - DNA, 201 bp, Homo sapiens
  misc_feature (1)...(201): n = A,T,C or G
gtctgctctcgccttggccttctacctaacaaagacgtgatgaagctgaagacatntttataccagtntnaaatataaagcggttctgagcttcntcttncgnngngacanggttacacaantatctgcgtgggnntangatatngcacgngccncttcnntnaggcttggaggaangatcatggaccgtgctatctcctg

SEQ ID NO: 1592 - DNA, 245 bp, Homo sapiens
  misc_feature (1)...(245): n = A,T,C or G
ccataattaggtcctgaatgccgaattactnnttacgtgaaccagactggaaagttgtccaggattacctcgaggtggtggagttcccggagttgaagggagttattttcatgcaaacggcctgtcaagctgtgcagcaccagagaggccgnagggcggctcanaatgnaaagggcttcgcaccaagcctgaggacctaagttnaagcctngctcagtatccacacggntagaaggagaaagtca

SEQ ID NO: 1593 - DNA, 322 bp, Homo sapiens
  misc_feature (1)...(322): n = A,T,C or G
ctattcttgactgccattgttgggattcggngttgcctagaagtacacccntggatgtctgggggagngtntccanagtgntgncacataaaagngagaagccanaccttagntgngaccggntccatccacacggaccagggtcctggactggangnnnaggagaaaaccctgaggtnacatntgctgaggctcatatggnacactnctanntnaaaggcnacacagnnttggcntcccaactgcaggatattacatgtttatagaacttaanatgatgcatattgatgttcnangcaagcccagcatctgctctccttat

SEQ ID NO: 1594 - DNA, 162 bp, Homo sapiens
  misc_feature (1)...(162): n = A,T,C or G
ctgcacatggctgttgtcattcgacagcaagcatgaagcncatataggtgcntcccacagaacccccaagcttccgggagcacagagaaatgagacttgggaagcaccatcnngcagtctcaacnccaccacntaacncaaccngagtaagacttgccatcc

SEQ ID NO: 1595 - DNA, 158 bp, Homo sapiens
  misc_feature (1)...(158): n = A,T,C or G
gactgagatggggcctcctggcgctgggggcaccacaggactataataattgtcaatggtttcctcaccactgtgtcaaatggcactccccccaagctggctcatctggacctcctcagtgacttgtgaagntcggcttaggtcattatgaaagaaga

SEQ ID NO: 1596 - DNA, 224 bp, Homo sapiens
  misc_feature (1)...(224): n = A,T,C or G
cctccggaaggccacaaaccatnttacccgaggcagctctctcgtccttntgttnntatgattctaagntctttcatttaaacagngaagacaatgttaccaactcctccttcccagaggtccttntgagagcatctacagagatttggaagcctcanncatgtccagtgggggtgatggntcancanttgaaagctcttgntgctcttgaggaagagccaggt

SEQ ID NO: 1597 - DNA, 281 bp, Homo sapiens
  misc_feature (1)...(281): n = A,T,C or G
tctgagcctttgcaggacatacnttaagccctgttcagagatggaaaactggatgtttggaacttaacaagaaccccatgcctaaagaacagagtcaaaacctccagccaggctgttgaagcacctgcaggacattttctctctgagtgtgtataatggaaaaggaccggtttgcttcaaaggaagacttcctctgagcatgatggagaggaccatgcttggttctggagagcaacttgatcttttcaaatggaagacagaagcttagagcaaaaaaaaaa

SEQ ID NO: 1598 - DNA, 161 bp, Homo sapiens
  misc_feature (1)...(161): n = A,T,C or G
aaagcacacactacacacctaacacaataanaattntatccanaagcntgggattcccggccntgtgccatccagtcccagtttctttgcggncctggggattgaattgaaataaaggtctcacgaggaccagccaagagctctgagttacaaaaaaaaaa

SEQ ID NO: 1599 - DNA, 428 bp, Homo sapiens
  misc_feature (1)...(428): n = A,T,C or G
agactgaggtggggtctttcaggccaaggcgccggtgncagtctgaggagagctcggagaaggaagcggcgggaggaggtttccttggcacaaatgtgccatatgcgaatgaatcactcatagcaacagtgccgaagtgtcgccgaatcgtttgtgagttgtagaggaagagatattgaagagttatccacaggaaaaccggcctatagaacatgagaaatgacctcatggcactctcctgctttggtttttattgtaatctcattgctgatattccaagtattgttagaaaagtaaaatacagtcctaggcttctaaaggaaaactccggaaggtttccagtcaggtcctgtcgagggcctgaatagactagagggatgataataatagtaataataataatcctccaatcaggaaatcaaaaaaaa

SEQ ID NO: 1600 - DNA, 159 bp, Homo sapiens
  misc_feature (1)...(159): n = A,T,C or G
ttctgggattttcatctttattctagtttngatnnanaagcctcggtnnnccancagcacatcccaaccccttattntgcctagggntagnccagtgctggtgctcttatngnaggagtgcggcactcagagnccttctctctgtcctgctgagaatat

SEQ ID NO: 1601 - DNA, 155 bp, Homo sapiens
  misc_feature (1)...(155): n = A,T,C or G
ggcagtatggcttatcttctttgtgctgncgcctggggacactggtcccctgcaatttttttatgaccgcanccaantatttnacaaaccncctggaccctttcccannangtgtccttggncacngntcantcatgcagaaagcaccaaggcct

SEQ ID NO: 1602 - DNA, 241 bp, Homo sapiens
  misc_feature (1)...(241): n = A,T,C or G
gactgagatatttganacggtggggnggctgcgtcgcngtgtgtgnntggnggacattntgatcgctgcatttctttagatntcggagctaagtgtatatatgagtngtttgccatgagatancacagtgtgaacagtagacacccagaaaatcgtggacttctgtgttctctccatttgagtattttgnaatttttttgaaatatttgnggacatacataaaaccaagctacactacagc

SEQ ID NO: 1603 - DNA, 224 bp, Homo sapiens
  misc_feature (1)...(224): n = A,T,C or G
cagtagaggcatccaacaggggtttggtgtgaggcgtgancttnacaggactttgatcttggagccatccccagnctgtnaaggcaganctgtgtcacagaccatngagtgtcnngaagattnagcaaccacgtgcngggatccctnattataangcanacnggncaggnacacgtnancgtgcccatnctngtggangttggaaggacagacaggatggagga

SEQ ID NO: 1604 - DNA, 228 bp, Homo sapiens
  misc_feature (1)...(228): n = A,T,C or G
gactgaggtagctgaggaatgcctgcctgcctgtcttnaacggagcaggaaagacccacatggacatttaaaataccagcgggatcccttccattaccaacgaggatcatcaagccaactgcaaaatcgcgttgtttctttttttttcccccaatcagnnagagtacacagaatatanacttngttcgataataaatactcaggaattaggtccctgcaaaaaaaaaa

SEQ ID NO: 1605 - DNA, 192 bp, Homo sapiens
  misc_feature (1)...(192): n = A,T,C or G
gactgagcagcagcacaggctattgtaaagtatggcggcacaccgtggaagggctcagnccttacctgctggagaatgaacagatgcgtngatgtacagattaactatgttntcacacaatactctgaagtgtattgaagaaattttctaacataatatgcatttatctgtcccgctattcaaaaaaaaaaa

SEQ ID NO: 1606 - DNA, 254 bp, Homo sapiens
  misc_feature (1)...(254): n = A,T,C or G
gaccgggttgcggccgcgcggntcccacccagcccaccccgccccgaccgacgggtggnggtgacctggatcctgcgagcgcccgncanncggcagcgatncgccctcgtattccagactggtttctggagcgcagaggagcgccctcctggcngcaccctttcgccggacccccaccccccganggctcggatggggcttgcggacgccgctggacgctgnnggggactcgctctcgggttgaccgccttctt

SEQ ID NO: 1607 - DNA, 477 bp, Homo sapiens
  misc_feature (1)...(477): n = A,T,C or G
tttcaccagcagttccctgccatggaatattactgcttgccctgatacanatgcncnanttcagcanagccggcccgngnngcgaccatagacacagtccggacgactgtgctcctaccagactggctggnctgaactccacagccacctgcagctcggaggaaganaacagcaccctcgtcgccttgacgccggtcgacnncactgancggcgtacaccggttccggcagacaaaagttccggcccgccctagttgcggaggaagctagcaaccgcccgaccgccaatgggcttgttgaggcgggagctaaggaaacacgggcggaggctcccggtggcgagaggctctccccgaggtttcctgccaattctcctccagagcgtccacacactgggtttctggtctagtgcggttttcttttgggtccatttagggatcttgttaatccacggtgtaggccttcagaaatagtcga

SEQ ID NO: 1608 - DNA, 215 bp, Homo sapiens
  misc_feature (1)...(215): n = A,T,C or G
ttgtgttgcctctgttncaaagccagtgaaggacaanggatagangtttacctttcaaggaacaaatgagacagatctatctgcacaccttcgacctgacttggacaacgaggcacagcgagatgaangacacacatacngaanagctgngttcaggtggaccatgtagccatcaaggacncttttattgacctcaactacatggactacgcgtt

SEQ ID NO: 1609 - DNA, 389 bp, Homo sapiens
  misc_feature (1)...(389): n = A,T,C or G
acacacaaagctcatctccctgaaggangatgctacccagctgnctgtgctgnccntgcngtccctgctgantgnaanaccattnggcatgnnntccatanaanngaagaatgaatantgngactntcctgcgngccctggatnntacacncttaaaatattggantttattgtatgtgaattatgcctccatanngcncanagagaaataggcncctnataactcgaattattttgcacctttggaaaacctgtgcctgtgctgagagcagtgattaattaacaccttggaggtatctctgactgacaaggccgggctaggtgcaaaccttcaaagacagaaaggcacatcagggggtttattcggcagagcctacactagcgtgagc

SEQ ID NO: 1610 - DNA, 230 bp, Homo sapiens
  misc_feature (1)...(230): n = A,T,C or G
gactgaggccggagagacctctggtccaacccccccccacctctactaacagaaggggaaatgaaggnctggagcgaaggagcagtctggccaaggacctgtcaccgtcgcaccatccaatagcanccggtcttggttcagtttctacttaaactctggcttgcccctcttgagtctacgacagactatgtaataggccaccacatggcctctgttttcatggcacaaaa

SEQ ID NO: 1611 - DNA, 175 bp, Homo sapiens
  misc_feature (1)...(175): n = A,T,C or G
cactacagcctggtgctcctttgccttctttanggcctgccctataacaatgattgatnnttggatagtnanngactgcctttntacttncacaanggggntgaaacatgngtcntttcagaaccataagagagantctcagcaaagaaactgaaatgctggaaaaataaaataa

SEQ ID NO: 1612 - DNA, 459 bp, Homo sapiens
  misc_feature (1)...(459): n = A,T,C or G
ctcacttaatcggacncaagcctannncacccnagntttggggccncnaagatggcngccgnacgtgnggaagntgctntnggaaggcactcgtgcactcttnatcttgancaccagnaccttgaacatcctggcccttctctcacaganganatcacagtacacagacggnganacagnncgcggantgagagtgagccgtccctcaccaccgacaaaaagacctggcctgggagcctctgcaccaccagccttcgtaagccccntagcatgcacgcacttctaacgggcggggcttaccacgctnntgngcacaggggntncagaaggntanaagcacatgccccccaacggcctggataatggcctggntgncantgggccacccttaggctgggngggaactacagggtnggaaggatcctggggaaccttnntggggntttacttgggtcccct

SEQ ID NO: 1613 - DNA, 468 bp, Homo sapiens
  misc_feature (1)...(468): n = A,T,C or G
gactgagctggccttaggtgcggcactagtgaatgtgcagatccccttgctcctgggccagctggtggagattgtcgccaagtacacgagggaccacatggggagntncntgtntgantcccgnaagctcancgnccanctgctcctactgnacngagttcaggnactgntgaccttnggatacctagtgctgctgtcccacattgnngancncatggccatgnacatgcggaaagcccttttcagctccctgctccggcaagacattgctttntttgatgccaaaaagacagggcagcgtagtgagtcgcttgactactgatgtgcaagaattcaaggcatccttnaagcttgtcatntnccagggactgngcagctgnacccaggtgattggtagcctggagnccctgnntatgctgncccctcgccttaccctgatgctggctgnngncacacccgccctcatgg

SEQ ID NO: 1614 - DNA, 243 bp, Homo sapiens
  misc_feature (1)...(243): n = A,T,C or G
taccacttcactccaaccaacccagtcttggctgntgngtncaagactgnaggngacgtagaagagccgnccttatgcacntgaacgtgcatncgaaggngccatggatcagaactcagcgtttttaggctnagcagnaagcaccttaaacccctgagacatttcacatcgatggacaccacccaccccgaacctgcttttaaaagaacataaatgaacgcaattgaatcccaaaaaaaaaaa

SEQ ID NO: 1615 - DNA, 223 bp, Homo sapiens
  misc_feature (1)...(223): n = A,T,C or G
cgcccttcgcttgtgcggggatcaccnngtnctctggtcctctcttaattgagggatnggcncaccnagattatgacntnacanattncttgaatttctccttagaaacagccactgccctgtnncttangatggacgtgtgagaagtccttttctgaaggaaatacatntatntggaagccactatattgcntctaaatatagatgattttactgagcgagc

SEQ ID NO: 1616 - DNA, 545 bp, Homo sapiens
  misc_feature (1)...(545): n = A,T,C or G
gactgaggtggggtctttcaatctgaggttccactttcccccacggcctggtatcacctnaccattagcggctgatgacatctgctgtgcgtgcggacatgcctcattaatgctgctccttnagatgcgaggccacccaggacagaacatagaagctgtgaggccatcangacaaacgttnaccatgctccatgctcctgccaaagccagcctccacagccgttctatagaactgaagcttacagtctactcatccatttcctcagacctgggtccctccacatttgtcaccacgagaaccatcactgcagacttctaggatgatgtcaaaaccctgatagcctgcctggacccatcatacccccaacctcaagtgaagcatttactgcatctggaggctttacttcggaactgcagtacttccagactggcttccccttctcttacccagatgacagtcatagcttgctgggccctaactgtagactcatatcctccaattaagcttgctgggccctgactgtagactcttatcaggattttcc

SEQ ID NO: 1617 - DNA, 239 bp, Homo sapiens
gactgaggtcgcctgctgtcttgagacgaattacctgggttccgtgccctggacgcctctcggagcccttccgactgcactcatccctgttctgaggccccctgcaggatctcctccttcacagcacccggctagtccccttcctttggcagttctcaaaggctccattcgtaaaacagatcacaagtttcactatgtcgaaattctttaattctacataaaatgtctttactcttaaa

SEQ ID NO: 1618 - DNA, 404 bp, Homo sapiens
  misc_feature (1)...(404): n = A,T,C or G
catggcctcactactgnngacaaagagttgncatgaggacntccagtggcntcaggacgcnncnacaggntnaggtcaggccangntctggccccaggctgcccatgtctagatgccttctggatttaaccacttntgatnangctagctagntatcataactnggcttngncannactgtcatcagatgctgaagaagagntaggggaangaccaactagactaaaancaacagatgggcttanngangcangatgtcancngagaataccggntggtcaggcgaggcacagtacctatacacagcacagcagaaattaantagaancatganatgttctactgcaaaagaccagtcaggaagacactccaaataagaacagtgttaactgcttgagcagagg

SEQ ID NO: 1619 - DNA, 508 bp, Homo sapiens
  misc_feature (1)...(508): n = A,T,C or G
actgagttcccatttcctaaaagcaggggtcctggcntctgctgnanacagcccacggaatgttactntcccatgtttgctccagagaaaagaganaatggaaggaaagacgtnnctgctgtgtagtttaggaacaacangaggaagtccctnttgatctagagacgccanggagaacncattgccattcctctccctngngagagnaagaccgncntagatatggctnganatccgngcctgagtccctatctgcctgagcggccattccagcantctggagaggcannatgnngcccagtttctcaccgccnnnagcgtgccannggcaggcnccttggcccagcatggtgctngtcccngtgaggcccggncccaggcctncctgccctacaggcccgngaccatgactcggaaggagggtggtacgngtctgtggtgagggctggctgnnnggctgacacagggnctgacncagntggcgtccacgcctccaatggacggtagg

SEQ ID NO: 1620 - DNA, 198 bp, Homo sapiens
  misc_feature (1)...(198): n = A,T,C or G
gactgagggaattcagcatattgcacacagcaccactggcnaagaacccttcaaccacagaccttgctaccagctatcgtggccacatgacccattcagggattttcaaatagtcagccgcctctctttctccccaagctccacaggccaccttctccaaaaaaataaagcagtgcctttaaattattaaaaaaaaaa

SEQ ID NO: 1621 - DNA, 523 bp, Homo sapiens
  misc_feature (1)...(523): n = A,T,C or G
agccagtgcccgtgctggggggaactctnacagacncgagancattanaccagatcntntttgntncccagagtatccagtcgaagctcccaacaaatnacagaaccttatncggcaggtgcttttccatatnagagagctcagcgtgtcctcattagcnttccaccttgacatcacatggcttctgatggctgnacttggaggtagaaccctgttcactgtgggtcctaatgccccccttgcaaccatgaagccctactctgtcacaagccctgcacacatctacactcccacagcctggatgtctcatgaaaatcctgggtgtgtgtgcatgctcttttggtgagacaccagatacatactaacaaaggccgtggaggaagaaaaagccgggaagccctcagctgcactcttaatactcccttggctgctgaggaagtagcagaagtctctaaactgttgtcaagacaaccaaagcacaaacacaaatctctttgggatcccatcaggaagcagtcctccg

SEQ ID NO: 1622 - DNA, 367 bp, Homo sapiens
  misc_feature (1)...(367): n = A,T,C or G
tgaggaccagcgctgatggtcgcctgnctccgcagagctgagcaaacgaagagtggggcagttgggcgcacagaaccaaagcactggacagctctgttggaaaggtttaaaaggccgttggaaacacgatccagttggagagatttgaaagcagccatacctcccaagttggaaaggacttgggctggatttacctagtaaatgagataaggggctatggtcttgtaggagatggacccagtgcaggccagccattggctccaatacataataaactgattcttttgagaggatggaccaggggactttgccttctcactactcagagtaaaacataaaaactattttatgactggaaaaaaaaaaa

SEQ ID NO: 1623 - DNA, 537 bp, Homo sapiens
  misc_feature (1)...(537): n = A,T,C or G
gactgaggcggtccagaacataggcaatatggacacaccggtctctagggccaaagagtcgtggatggaaccactccngcctaccgtgcgccagggcgtggctgcagcctgaaggacttcattatgaagcttgtggacatagaagaaaaggaagagctggacctgcagcgggcttttgaactcacaggcaccacctgtgaaggagggaccattgttcatccacaggaccaaaggcaaaggccctcttgcatcctcctcgttcaagaaactctacttctcccttaccactgaagccctcagcttcgccaagacgtccagctccaagaaaagcaccttcatcaagctggccagcatccgggctgcggagaaggtggaggaaaagagcttcggcagctcccacatcatgcaggtcatctatgcagatgatgttggccgtgcccagactgtctacctgcagtgcaagtgtgtgaacgagttgaaccagtggctgtctgcattgcgcaaagcgagcaccaacaacaggggcctcctacggtc

SEQ ID NO: 1624 - DNA, 515 bp, Homo sapiens
  misc_feature (1)...(515): n = A,T,C or G
actccgcacagaaggcacagaggatgtcagattttgcatgagaaaaccaacactcagaaaggtgagccttggtaggtctgagactccacctgagaccctgatcttgtccctcctgtcaccgacttggtctgatctgggcttgaactattggactcacctccttctggatacatccggggcatggagnnatggttccatggttaagancattggctgntctttnagaggacctgggattcaattnccagcncccacatggganntcacaactgtctgcanctgcagntccagangatccatggnaacaggcacgcatgngntgcatgtatnntncantaaaatgtatttaacaggcttatntatgctgnnnatgtgcggnangagnnncactatgnatctaaagctggacttnaacctactatgaaactgcggctgaccttgnantcttnatctagggnacgaagantactggactgtntnnccacncccnggcacagnctatgaggatatggaat

SEQ ID NO: 1625 - DNA, 541 bp, Homo sapiens
actgaggttatttactgagcagcggagaggaaggaaatttctaatagcgcgtgaagcaaggtaacccttcgaaagcaaagagaggtgacagccaccttagtggagtccgccccggtgcatctctccgctgcagccccgccgacttgcagtccttctcctgctggggcgatcggctcagatgcggccagttcttcgaggattggaattctctgaacttcaaacgctgtgggtttggcttccgcccggctaggagggatagagggtggctgagaatcctagggagccaaggggagataagtcgcgccagtcgttttaaatggaatctaaacctttgcttgggccaccgaatgtggatccccacggaaacagcttcgcttcgcaagaaaatccggcttgggagagaggcggctgcggttgtgggagctgtctaagtgacccgaggcccgtggggcgtggtcggcagtggtcctgagcggtccagagcacctttgcacatggctggctgaaaggcaagggtgaaagtccagggactcgaatgtgt

SEQ ID NO: 1626 - DNA, 159 bp, Homo sapiens
  misc_feature (1)...(159): n = A,T,C or G
cttcaagagacacgctgggtagctttgggantgcagctgccttacggaggagtaacggngaggatncntgcatatgcnaatgttaccataaaatctattattttgtataacaacttaaaattaataaaaataattaaaattgattttaaaaagaaaaaa

SEQ ID NO: 1627 - DNA, 548 bp, Homo sapiens
  misc_feature (1)...(548): n = A,T,C or G
gactgagcctggtagctgaacctaccaagaagatgctaaaactgtccgctgccctgacctctggaggaaaagggccccaactatccaggccttatcaagtaagcagtctgngactgctgngactacaaggagaggcaaagtcaagctggcatcaagacgatggctgcatctggncctaagcaaaatctatgatctaaaaaggaggctgagagcacagtgatgccgcgaaagttaaccttcgcgtctctgtgctataatagctatgatataacaacttaaggatatatttgtcttggctcacagtttcaggatcatcctttcatcctttcagggtggggtgagggtgacaaagaccaggagctcacatcatggcctccagaagcagagctaaaaggaatataggaagagaccagggcaagatgtatccttgggacacatctctgtgattctctaccgtcttcagtcatagcccatctcctaaagcttctagaaattcccccaaagagcacccagctggagctccaggcttaaacacatgagctcgtacc

SEQ ID NO: 1628 - DNA, 454 bp, Homo sapiens
  misc_feature (1)...(454): n = A,T,C or G
gactgagcaaaaattcccatgagttcttgaaacgtacagacagttccattgagaaagcaatggagtgatggtggattcccagttcaaaagcattcagcaagtgaagcaagaggatcacatctctggcctctgaggtctncngtccataannaaccanncattctgntnacaanagtacaagcnacacatcccattantacttcancantagtctatcacacctctgacagatggaagaagcatcagatgtttagaccaaggccccaaaagagtgtgaatgagataaacttagnaatagagaganctgcagctggnngaggaggcacacacctgttaatcttctaatcacaacactcaagaggcaaaagctggcagatctctgagttcagtgacggtctggtctatagaacaagatccaaggcagacaggnctacatanaaaaaccttgtcttaa

SEQ ID NO: 1629 - DNA, 542 bp, Homo sapiens
  misc_feature (1)...(542): n = A,T,C or G
gactgaggcttcctgtggcatggaagacctcagacgttctgtaccatcttcctccaaagccgatgagcttcctnggttgtggaagcattcacttggccacccaagacttccccttcatccatccagccacactgtggaaggctgtgacaggcagacatcttgctgtcccactaagatcatgagagccacagngaaatcagactccatggactcatgacattttgcttggatctccgtgtcccacaaacactgactggaaaccctgagggataagtgttacatcttgaagtgctcatggcccatcaggacnaggacaaaatagcaggctataaagtgcaagttcccttaaagatgtatgaagcacagggacctctgataccatctagcttttcctcacttgaggcacatggccctctctgcccactttgaactccttatattttggagattggagaaggatccaagggacattgactaagttaccccaccccagcaaccccacatnccaggacccagaacccatggttcccgctataagattc

SEQ ID NO: 1630 - DNA, 182 bp, Homo sapiens
  misc_feature (1)...(182): n = A,T,C or G
cccagatgactccgaagntccatccttatcatggaatngncntctgncaaatgcccangacaaagaggccaatgaaggagaggcatnaggatggggcgagtaagccaccncacnaagtctntgtttncntgctggganagactgaaaatgatgaatcaggaggaanaagaggaggaggagga

SEQ ID NO: 1631 - DNA, 154 bp, Homo sapiens
  misc_feature (1)...(154): n = A,T,C or G
gatgttttggaatgcacnatgtccnatgcantggagaatatatcattccnatgaaagagaaganntgatggtttgtncngaactggtcattgtacgatcngaantcttcatcatcngntntaagctgcngantgcatggcgatgctccgtcctt

SEQ ID NO: 1632 - DNA, 197 bp, Homo sapiens
  misc_feature (1)...(197): n = A,T,C or G
gaggatgcggctgcggcccangatgggcggntncaggagggngataagatnctctnggcaaatggncaacgatcngnngaacctgctgcaccaagangctgtagacctnttccgtnatgcggnatgtgctgcgtccctganagtacagcacaggttaccaggtgcacaatggacctatagngcatcaaggtgaagga

SEQ ID NO: 1633 - DNA, 222 bp, Homo sapiens
  misc_feature (1)...(222): n = A,T,C or G
gcacagtgtcccatgccagtgattctcagncatcacnttnttntgngatgctccggaactgtcacntggntacaagaagatagcatcanctttacttgcattttgacctaanaggctgaaagcngatatnanacttttttncatntgcatcnaatttanttgcattttcacctntgagtgnggaaagcaaatatgaanctttttttcatctgcagacaaaaa

SEQ ID NO: 1634 - DNA, 229 bp, Homo sapiens
  misc_feature (1)...(229): n = A,T,C or G
ttctgaggtcgatccttcgggtntcacagtctcatcgtgtctcggacaggatggcagagggtacaggtggtggtgatctcctgacagctggacctcccacaatgtcanagctcacgcttgggctgcccactctacccttctctttctcnttcagtagnntaataattgtttttctaaacattaaaccatcaagacttctgaagagcagaaggctacactctgaaaaaaa

SEQ ID NO: 1635 - DNA, 253 bp, Homo sapiens
agtggggtctttcagctcagcccccttcaagccctcccctgcatctcagccggagcctctccgaaccggcgctgatcgatgccgagactccccagggaccctatcgcgactccatcgtgccatatctcgacatcaccgtaccctgtcgagactccattttgtcacaacccctttcagtatttatctatctacctatatatttttttaaatttgccctatcatatttgggggctgtccccttcaaaaaaaaaaa

SEQ ID NO: 1636 - DNA, 220 bp, Homo sapiens
  misc_feature (1)...(220): n = A,T,C or G
gactgagctgctgtctctggaccatcacagnaagtgctaactgctgggccctgtggtgcacagttcaagaggaccctaacatctgctctgcactgtcacatgggcttggtctccttatctccaccaactgcacctctgcgcagaggacaggaaggggccaagcaggtaaccagagcacgtgactatttagtaaaacctcagagctgcattaaaaaaaaaa

SEQ ID NO: 1637 - DNA, 377 bp, Homo sapiens
actgaggtcctcgccctctgcagagtgttctctccttctccgactaaactgccccgcacaagtattggaagaagagggctctttggaatgaggtcttcaacttatccgacgtacaccttccatgaccgagaagaagtcattaaagccaacattagagaccccttgcaaatcatcaaaatagtacatgagaatgaacatctcggattcctttacatgatctctgccgtacccaagtcttccatagaatacgatacgtataatctaaagtgagttctcttttatgaagcaattcatttagcgttacaaatctcaaataaggttgtaagtgttatccgtaatcgacttggcactaatgataaatatgatcaaaagtaaaa

SEQ ID NO: 1638 - DNA, 168 bp, Homo sapiens
  misc_feature (1)...(168): n = A,T,C or G
cccacgctgcggttgccagagangtcctgatgctcgcgccacttcacactgaccctttcnnaaatggcgccattctttagaaataatcttaatttacttcccaaattttnccttcntagggagangtntncgctatgantaaagggtnctntgagcgtgacacacaag

SEQ ID NO: 1639 - DNA, 354 bp, Homo sapiens
  misc_feature (1)...(354): n = A,T,C or G
gacttaatgcaggtagcgtccaatgttcctggctgccctagaaagttctctggaccgtgaagcagaaagggttcggggtgatgctggggttgccttgcgtcgggagctgtcaagcctgaactcttacctagagcaactgaggcagatggagaaggtgctggaggaggtggctgacaagccacagacagaattcctcatggctgcagaagatcctgtcagagtcaccaccaccggcaaggctagatatccagctgcctgtcatctnagatgacttcaaattccaggtgtggaagaagatgttccgggctctgatgccaagaatcgntnggcttggaaagtattgtgagaagacac

SEQ ID NO: 1640 - DNA, 318 bp, Homo sapiens
  misc_feature (1)...(318): n = A,T,C or G
aggcccttggaccttacnggtaagtgagaattcaccagccgtnncgctanaggacaagcanaggnggaaacgtgcggtattttattcncctgctgaaggaagctganctagctaaggangangataccacgttnattatgtgtntgggacaggaagtaacagctngtctgngaaaaagaaactggtttaagtagatagggttattttactaattaaggattaaataatggttattaacttacttggtttgacctgaggaaggtagatttgagtggattccttgaagtctataagaatctctaagtttaaaaaaaaaaa

SEQ ID NO: 1641 - DNA, 286 bp, Homo sapiens
  misc_feature (1)...(286): n = A,T,C or G
ctgaaggcccctgcgacctacagcaatggnggggaattctactaccatacaagcgaccaatcctgcagtggcgtgtgcctcttgtaagncaattcaattcaagcttcangagacggnggatcattgaagtcaanncngttntgactcaggcttnctagagacacaagttcaaggaccatgctctgagacccttctttcttctttaggtgtgtgttaacaagttccagcttgcttgactggtncaccagctaaagactggagttncnatgactcactccttcccgga

SEQ ID NO: 1642 - DNA, 162 bp, Homo sapiens
  misc_feature (1)...(162): n = A,T,C or G
gactgagggtgagcatcaggattctttctgnggtnnatggtgaccttgngattgaattcctgatcctncggtctncacctcccangtgcatgagatcngaggtgtgcaccgccntgnntggntgnccntgantagttaccatgtgctgtctggttgaacctt

SEQ ID NO: 1643 - DNA, 323 bp, Homo sapiens
  misc_feature (1)...(323): n = A,T,C or G
actgaggagcacctggnncaccaccacacaggctttgtgggatcggagtcccttgaattcacacatgctgtcccagtattggttttccagactgtcagcaatgcttcttaaaggcaggggattctctgttcctgagaaaacagttcctgggcaagcaagggcagatagaaagcagcaacaagacctgtgtcgacggcccttgaccgcctctgttttaggacggaggttgttgcctaaaattgggagcaactgggagcgtgaagtgatcatttcattgccattcctgttcatgaacaagtagaggcccaggcaagaaaaaaaaa

SEQ ID NO: 1644 - DNA, 231 bp, Homo sapiens
  misc_feature (1)...(231): n = A,T,C or G
gactgaggaaattaaggcaaagaaagcaaaagtaaaagaattgagagaccagcaagagagagacagaaaagagatgactatttccctcagctgncacttcagcctctgaccatnggattctgtggcctgtgtgtctgactcaaggcttggtatcatgggataccttgcaggaagactggaatcttatgttctctgtttaatacatctactatgcacagtcaaaaaaaaaaa

SEQ ID NO: 1645 - DNA, 359 bp, Homo sapiens
  misc_feature (1)...(359): n = A,T,C or G
atcccacaagacctggctgccngccnacaggggaaaccancananatccaancccagaaaacagaanaactgtgcaggtcggagtggnccttactttgcttgnntttgggagtggtcacatgaggggttaacgtcagtgcctcttctccccaggaccttctgggaagggagagggagctatgcgcatccctgcttcacagacttctatgcatcatgctctgaaaataactctttatctgggactcacatgggaaaggggccaatggaatttcacatgtaagagtgtggtggttgtaatatggaaatagctagaatggcaagtgttaccgaaatgtatactttaattatgcttttaataa

SEQ ID NO: 1646 - DNA, 236 bp, Homo sapiens
  misc_feature (1)...(236): n = A,T,C or G
gaagagtcgggagaataagcagaaaaagatgatggaccctccagcgatggagctcaagacaaaagcgaaggattctgagatagagggtgaagtgggaagctgagaagacccaacatggggtgtggatctgaatctataagggatgcggnccgagagagggggtgaagaggaattgtatagagtgtcaccttgcaagaagagcgataggctaagtagcctagtggaaagaaaaaacc

SEQ ID NO: 1647 - DNA, 153 bp, Homo sapiens
  misc_feature (1)...(153): n = A,T,C or G
caggacaggaaggactttggacacgtgtattaaggtntttgccctnaagactgtccaagtgattgtccacggcgtcgacattgnanaaaagatttgctccctgctcatcatcttccgcgncgggntcagatctggtncaaattgtagcaaatc

SEQ ID NO: 1648 - DNA, 154 bp, Homo sapiens
  misc_feature (1)...(154): n = A,T,C or G
aatcggtcgcgagggcaacaccacttgatngcnggtgnttgnacgattgcagtagttgggnactggctntggcaaangaatctcaagccaaggatgtcatctgaggaatacttcangtgcaagaaataantaaattttggctgaaaaaaaaaaa

SEQ ID NO: 1649 - DNA, 248 bp, Homo sapiens
  misc_feature (1)...(248): n = A,T,C or G
tagactgagtggggtctttcacaaccagnanagccggccttcctgtgccgaggacacagagataaaaattcagaagactcactcccactcctgtcttgtcaccaaggacacccggaagagaagaactcctncaacttctcccatttcttagctagctgtaaagncccctactggccctttnggggcgaactccctgccctgnagggtcaggggttcgccctcaactacctanaaaaaaccttttgggg

SEQ ID NO: 1650 - DNA, 251 bp, Homo sapiens
gactgagctgaagcactctggtgagtcactacttcagagctttccttgtgaacagactccattgccagagcatccagagcatccagttttttgaaaacttcctcagccagaaaggcccaagtccaggcagcctgtggcagagttacagttctgtggtctcctgttagttaccttaatagttacctgtgtaattagtgccaccttaatgtatgttaccaaaaaataaatatatctaccccagaaaaaaaaaa

SEQ ID NO: 1651 - DNA, 402 bp, Homo sapiens
  misc_feature (1)...(402): n = A,T,C or G
gaactgagcctctcacctcacagcctaacggnncaggcatccctaggatggattgacagntgagtnacaaaacttnagangtnangtanctcactggtgnccaggaggaggncannngcanggattttancccttgngagtctgacatccangctntcccttgccnnatnaagtcngccacgcctctnaagccacagcctgnagganacacaaaccagagntggcatgtgaagatagattgtattnaaaaccaccncaaacatagtatttnctctttctcttctganttataccanctatnagactcaagaganntgagaccctgtcttgacccctgtgagcaccaggcaagtatacagtgcacatacacgcatgcaagttnaacactcacacacaaaataa

SEQ ID NO: 1652 - DNA, 234 bp, Homo sapiens
  misc_feature (1)...(234): n = A,T,C or G
acacttacttgaagaaactcaacttaagacccagnatctaagattttgctaacacaagcaacttcaccgtcattctagaatgtatttctcctttgatcttttatttccctttgcatttctctgtttacaaacttcctttctctgtttctttctttaccattataataaagtctgaaaagtatgaactccagattctgtttaataaaaaagcaaaaggccatacagaaaaaaaaa

SEQ ID NO: 1653 - DNA, 335 bp, Homo sapiens
  misc_feature (1)...(335): n = A,T,C or G
ggacagtccagtatgacagangagaaccagtagtggagacacancntnaagagggcctccggatcccnttgcggatggctatgagccnccatgaggntngttgcagcctngaactcagggacctctggaagagcattacagngcatantaccccgctgagccntcngtccangcctacccatcatgcctatcatgtatattacnntattgctnnccagctctacttcttangancanctagcaaaagacaaaaatcaagaggacaacaagggaatcttggatgagagctgtacaccaacgaattanatagcgntgcctgccacggtggcacagaa

SEQ ID NO: 1654 - DNA, 251 bp, Homo sapiens
  misc_feature (1)...(251): n = A,T,C or G
tctgagggaggctctggcttcacttncctagagacactgacagggctgaggattcgacccannagggtagncgcagaccagctgccntgacgacnccggacgattccaactccgcggctgtgacggcagccgatcgaggaccccgncttgccgccagcnnccccaaggaggcgggacctgngcaggnccagcangngcangaacnntnagcccaccttctcctnangctacgcgcatgatcgacatggcac

SEQ ID NO: 1655 - DNA, 386 bp, Homo sapiens
  misc_feature (1)...(386): n = A,T,C or G
gtgggggtcatctgaggtggcaggggaagatttggtatccgtcgagatggtccaatgaaatttgagaaagactttgactttgnaagtgcaaatgcacaatttaacaaggaggaaattgacagagagtttcataataaacttaaactgaaagaagataaacgttgagaaacangagaaaccctgtaaaccggtgaagacaaaggagacntcaggagncgacactcagaacagcgaagggaatgctgatgaggaanattcccttgggcccaactgctnctatgacaagaccaagncnttctttnacaacatntcttgngatgataatagagaanggagaccannttgggctgaagaaagaaggntnaatgctgaaacttttggcatcc

SEQ ID NO: 1656 - DNA, 160 bp, Homo sapiens
  misc_feature (1)...(160): n = A,T,C or G
ccttgagtgactgggtcctncattggatctcancatcgtagctcctgactctcatagcatgtcgcataccngaagtcggnaatgttgttatatcctgcnttgnggatnccctgcctcagagcgtgaggcaccccatgncngaagaaaggatccttaatgc

SEQ ID NO: 1657 - DNA, 192 bp, Homo sapiens
  misc_feature (1)...(192): n = A,T,C or G
gagggacagagagagcatttggctggcgctacagtcttacacctanatncaatnattggatctgattccnnnatgcctttccngactacaacccagacatgggagtcgctgnccggacncaacntataacaatattatgatgtatgtaataatataatataataatatgtgattatatattgtattatagta

SEQ ID NO: 1658 - DNA, 217 bp, Homo sapiens
  misc_feature (1)...(217): n = A,T,C or G
gtcggtggcctaacatgcntacatgcatcagctaccctcactacagcatctgacatatacacgtnccgttcatatccgcccgccaagcttccattccgcccatctccatcngcgctgagtgccccnattgccccacccccaaaccccanggttttctctagttttatggatgcaaacggagagagccagggaccgagaggtcttgtcacgctcatca

SEQ ID NO: 1659 - DNA, 199 bp, Homo sapiens
  misc_feature (1)...(199): n = A,T,C or G
atgagatgcaggacgtgccagggcatactctcgagtggncaangtctcgggtctnccatggtgaagaaccanctcccncaanttggcctntgaccnccacttgagngccngntatggtttatgcactcccacgaatacaatttttaagtgtaatttcaaaaattgtaaataaaggagtattaaaataaccaaaaaaaaa

SEQ ID NO: 1660 - DNA, 186 bp, Homo sapiens
  misc_feature (1)...(186): n = A,T,C or G
gactgagttttttaggaatcttgttggcgttggagtctgatctgaaataaatgccaagaagtactaagcatacaaatgcaaatgatcatgtgaagattctaaaacgctgctaggaatgaacagtactgaagactgttgaaagttnccctccataagttgttttcaataaatcaccaacttttttgt

SEQ ID NO: 1661 - DNA, 509 bp, Homo sapiens
actgagccacagctgcagaaacccgcctcctcccccccaaaagaaaaggattgagccgacgcggtttattaggaagagcttcgcttctcccagctacggactactcacgacaaaatttgaggcttgagaggactgttctcccactggtctgcattgggacttaatgattctcaagtgcatcacattattattgcgttgttgtgtcacatccgtgcaagggtacaagcctcccagacacaagatcagtgtcagtcacatgccactgttctgaggaactcgtgaagtagacaaggaagatgccaaaatgtcaagatgaacagcctaattctacaagagtgactgggacaggaagcgtggcccaaagccgtcccagaataactggatcctccactgtatgtcaggaaaaacaagtcagattaaaatcactgggtattttgggaaaccctcctaatttaccactattgctgatgatagtttccaaagggtggagttcataaataagaaaagtt

SEQ ID NO: 1662 - DNA, 261 bp, Homo sapiens
  misc_feature (1)...(261): n = A,T,C or G
gggcatgcagggcacccttcattattcccttgcacaacttgcagttgatttgatcaagagaatatctattattttatcataaaagcattatgcaaatgttcttggnatgatagnantgttagaattcttgngtngnaaanctaccctttaggncnacaggcntggnagattnganctgangggatatttntaggatgaggcctgctgatgacngnnagtnnctgntccttaaaagtgcggangtaaacaagtgcaaactat

SEQ ID NO: 1663 - DNA, 176 bp, Homo sapiens
  misc_feature (1)...(176): n = A,T,C or G
aattcttcaaactgtttnngtgtggcgcgngctnngctgctccatgcnaccaccaagaacgttagacggnagnggcaactacncattnagcaccagccancanaagtgaatangtnntgngctgccgccgnttccaccttccactccactccgggaagaaagagcagccatcatgt

SEQ ID NO: 1664 - DNA, 183 bp, Homo sapiens
  misc_feature (1)...(183): n = A,T,C or G
ccaccgggcccacgctggtacaagagancagacttctatacgatgncncacncacacncagggactgagagaacaaaangacccagagtganaagaggttctaaaaattcaattnncaacaatcacatgaactctcacaaccatctgtacagccacagtgtnctcacatacagaagataaata

SEQ ID NO: 1665 - DNA, 184 bp, Homo sapiens
  misc_feature (1)...(184): n = A,T,C or G
gcctggccagtaggccatnaattacttgcttggtgggaaacttctcaaangtcggacaggaagcanggcgtggttcgcatncctgaaggancaaanacaaggcttctncttngggggtggcntcaannaaggtgntactcancgggnaannactggccngccaagcaatcccttgggtttattt

SEQ ID NO: 1666 - DNA, 507 bp, Homo sapiens
  misc_feature (1)...(507): n = A,T,C or G
ggacaggaccacgcccgggagaggcaggangcgggancacgacccagaaacagcagganagcggagcanggcaacccacaccagcccagcgcccaacggcaaacagcccaancgcangcgcaaaccangggccaancggaacccgcancacggagcangncaatgcacacacggcgcccccggggacagagaaccangggccaaccacaaggagaacaacgcagagcangcagagccacaaccaagccaggagcagagaacagcacggagcacaacagcangtcacgaccacaggcnactcaccatgcggagcccaganaggctannggnccgttcgtgaanacgaaccacgctttgtggtaggtntanccaacgacaaaggnntaggtntcccncnnaaancatgctnnnntttntnttcgttttttgtncttgttttttcantntaccagctanatcncggnggngcacgccccncccatggngtccccgtggagccgctgatcc

SEQ ID NO: 1667 - DNA, 220 bp, Homo sapiens
  misc_feature (1)...(220): n = A,T,C or G
aggggcctcagacctcattgntccctgggtcgcaggntgtcaagtaaccctctctacgtgaggaaggaggctgcctcctgacacagatgtctgataacgtcttctgngggncacntttcagaaaatgaagggcacacaccacagccacctgntgcccntgccctgcctctgcctnncaagngcttgngattaaaggcatgcnccaccacctgcccggcct

SEQ ID NO: 1668 - DNA, 311 bp, Homo sapiens
  misc_feature (1)...(311): n = A,T,C or G
actatactaaactgcgctggnagaggaggctgtnnancnnnttacagaatgcanaccttaatagagaacttttcactcaaccccttgtaaagtggggactgtctgtactgtggatgtttggaggacacagaacacaagacctttctatcccaggagacctgtagctccacagacgcacaccagagggagcaagagatcataagctcctgaaggagaagcctgtgggtaagactaaggataccataaacccattgataacaaggccctcaaaggttgcagagccagccancatttccagctagactgaccgg

SEQ ID NO: 1669 - DNA, 213 bp, Homo sapiens
  misc_feature (1)...(213): n = A,T,C or G
gctcagctatctattcaccatggcagttncccatcgctatgaanaaangcattgagcgcatattcatatatccttcgtggctttggtctgaatgggaaagagtttgctatagaatccggtagtcagagatgggtaagagtgttcttgaggtcctgtcaacctaagacagagacatacatcaatgctattcttttttttttttttttttttttt

SEQ ID NO: 1670 - DNA, 204 bp, Homo sapiens
  misc_feature (1)...(204): n = A,T,C or G
gactgagtttgtaagttctttggtgtgcttccaagcggctgnggcacatnaagctctgaggcttgaatgggctgganagactgcntannaggtaagagnatttgctgnccttgctgngngagggccanggncggattncagcaccagcatggttggntnncaagcatncgttatcctccaatnctgngcatatgacgccctctt

SEQ ID NO: 1671 - DNA, 226 bp, Homo sapiens
  misc_feature (1)...(226): n = A,T,C or G
gagaaaggtgttgtggatgagcaggccagctctgctgctctgaaggtacgcaggggaacctggacttgcaaaggttgctgtgtctgggaaagtaggtggtttagggggtaaagtcccagtcttgacactgatttactagggataggaacggaaggattgttctctgtgtctaacattccttcgtgcttacagacgcgtattatatgttncctcaccaaaaaaaaaa

SEQ ID NO: 1672 - DNA, 248 bp, Homo sapiens
  misc_feature (1)...(248): n = A,T,C or G
gactgaggatggatacctcttcactctaatggcaaacaagagcactggccaaggcaacccggnaccgaaggtgctcagctgcttactgattctgccagattcatcaccaaccaggcnngcacttgaaggtggtaaaaggcaacnagtaacaacctttttgacatttttcaaaagctgaaagttnattaaagggggtnattaccattggaaccacaaattaaataaagnagttgccaccaaaaaaaaaa

SEQ ID NO: 1673 - DNA, 429 bp, Homo sapiens
  misc_feature (1)...(429): n = A,T,C or G
gaactgagggaaaaccctgaatnaattttgtttagatcatgaaaatacactcgccaatggccgggtcctctgagacctgctctccatctggttcagcaagttgccctctacagctgaagaagaatctaccggcgagtctctgggacagtccggcgagtctctgggtcgatggttttgcaactggacaaagtagaagcgttaatgcaggtcagngagtgggagttgngaggntgnatgagaggtctcggantgtagggggggcanaataccangcncaaagtnncacantcacacantaccanatacaaatnacngagncttagnnactnangacagnctttaacanacantnagggcatatangtaattaancatgantattttnnnancaagcaantaacctttctantgtaacccagtctgtacttc

SEQ ID NO: 1674 - DNA, 347 bp, Homo sapiens
  misc_feature (1)...(347): n = A,T,C or G
gactgagagtcatgttcttctctttgcccactgagaggngagtggccancgactggtctgacctcnccacataaacagcctgcnnattggacttgncagattatnaaggactgacccancngttctccagcgcccttttgctgtanttgtnattnnactgagcattnaaaaggctctnggagaaattcttgnatttgaggaangcnagaaannactggcctttgncncnngctngagnnaatntgtccngtgctcngaatttactcnatgaggagccntagactgttgccagtgttgtccaaggacaggaatcaaattataggaacattaaatgtctcgtgaactaa

SEQ ID NO: 1675 - DNA, 186 bp, Homo sapiens
  misc_feature (1)...(186): n = A,T,C or G
atggctcagcctgtacaagtatttgccggnaagccttgngaccacagaccnctaggacccacatggaaggaaggagagaactgactcccaaaacactcctaccatcaccacatgtgtgctgtgtcaccgcacatatgcacaaacncacacatgttccaaatgtaataaaaattaattatacctcaa

SEQ ID NO: 1676 - DNA, 206 bp, Homo sapiens
  misc_feature (1)...(206): n = A,T,C or G
tttgagccccaacccaaagngttttcacaccaaacccttcacacccaagtaggatgtttcgctctgaagtcatcagctctataattctccattctggctggcccacccccaaccgagcgcgaggaggctgcctcgcccaccctcgtcataatgggcaaattctagccggattaaatctagctggatgtctaacctaaaaaaaaaaa

SEQ ID NO: 1677 - DNA, 419 bp, Homo sapiens
  misc_feature (1)...(419): n = A,T,C or G
gtatgtgacaagttagaagncagaagggccaaacatatgtacagagaggctgagagaagcgcatccacagaacaatgtgaccagagctgacaggaaaacatgtttgaggtgtgggacagtaacagtgaggtctgtgcattctgaaaggagagagcacctgcttcctggaggtggtgttgggggggacaggaagacctcagaggggaaaatactgtagagaatgtttacatagaagggtccaagttgcaaagctagcctcctttaaggaccagtgctctgactcaccatgcagaaaaggatgggggaaggtgctggggacacagcattagtaaggtcagaagttcagggttgaccttggctatgtggtaagttcaaagccagcatgggctacatgttgtctcaagacaacaataaaaaaa

SEQ ID NO: 1678 - DNA, 454 bp, Homo sapiens
  misc_feature (1)...(454): n = A,T,C or G
actgagagctatggagactcaagctctggaccagggactctggaagcctttggtgccaccagtcctaacaaggggggcctgtctaagaccaaaaagaacttcaaagacttgatgtctaaggtgacagagggacagttcgtgctatgcaggtggacagacgggctatattaccttggcaagatcaagcagggtcagcantcctaagcaaagcgtgccttgtnacttttgaagataattccaantacttgggtcctgtggaaggacatccagcatggtgagtggccaagngtctaccgcccctcccccatgcctgctcctctctgccttcagtncttccttctctgtcacctttttctcttgccatctgagttagtncatgaactccgtgccttgagtacacatcttggncccatcagaaaagataattaaacgtctactcatggaaaaaaaaaaa

SEQ ID NO: 1679 - DNA, 291 bp, Homo sapiens
  misc_feature (1)...(291): n = A,T,C or G
ctgagggaggttctaagtcacatcactccctttgctgccaagttcatctttatccaagaatccccgtgttcctgggccctgaaaccaggtctctgtcccctcctgcactgggaaatataaagagcttnctgcttccctcagtgcaaacaccaacccaactctgaaggaggcagaanagccagagaagngacagggtcagggtcagcaaggagccccgcttctttctgtgacctccacaggcccggggccaaggcccttttctagggatgaataaactctgttttctgaaaa

SEQ ID NO: 1680 - DNA, 381 bp, Homo sapiens
  misc_feature (1)...(381): n = A,T,C or G
tacaagaaaattgctcactatccctccactgtgatgtactgtcttgttcattctgcttggaaacaactggtgccagcacatcatgcccgtgagccccaggtccctccagatgtccctggagatctcagcgttcctgctccctagggctgttgcttctgtccaggggaccacctggctccaccccagggtcatctgtgtagaactgctgccgccaggccacttcacccgtagccttgcagtgacaccttcagccaacctttcctggaactaagnngtccatctttaagncttgatctctgganggtgttgncacatgagccagcangaananggcagtgctgcnnnantncaccctcctactatggaagaactataccctga

SEQ ID NO: 1681 - DNA, 372 bp, Homo sapiens
  misc_feature (1)...(372): n = A,T,C or G
gactgaggataaacttgaagacctctgagaaccagctcgaatggaggctactgtgtcaaactatgtctgactgagtcgtcgccaacccagcagctgccagcccagcatgctcacagttcactgtctattgatgaaaagactttggttaaaccaaaagctgttgtcatcgnagcacaggccatcctaacaactcttggtagtttcaccatacccgaacaggatcctacaaactccctgaagnatctgtctgtcacgtgcacttctggccatggtattactaatagtcaccaaccctttgttagttcagtgttaccccctacctcttggcttctccctaatgtcagtttcaataatgccttttggaccttaaaa

SEQ ID NO: 1682 - DNA, 208 bp, Homo sapiens
  misc_feature (1)...(208): n = A,T,C or G
gtccaactttgggagctgngatgtctaaaaaccctgtattgctttggctgcagtattanatantgtgaaggtaaanggagagggccatgaacnagagtcnngtaagctcataaacagaagcaaatggngaaaacttcanatntaanttcaatattaataagcntgnnatatnnataaacagnatattaattaaggtaggaaaggaaag

SEQ ID NO: 1683 - DNA, 510 bp, Homo sapiens
  misc_feature (1)...(510): n = A,T,C or G
gactgaggttctgtcctcacttgggaatcagtaaaccatggcatctaagaaatttgccgttaaacctgaagaatcactaaattgtcagccaaagccagngctgcttggaaaatgggaaagatacagaagatgggacctgcttcttctttggcctggcatgtgaacttggggcccctctgtttggtgatttctgagaggatgtccaagttctgtgttgagccactgggccaagttgaagtgaagccgctcctcattcacatgtttgtccttaaggtctgtgctcagtaactgttttgtagattttctactgtgtgactctgagcttagagttactgagtgttgtgcttggcatatatctgtagttttgtaaggaacctgtaggctgaagaccatgtaagcccttcctattctctgttttcctcgtttctctgcctaatcatatgtattgctacacaagtatacatacaaccaagctctattaaattattttttcttcaaaactgaattaag

SEQ ID NO: 1684 - DNA, 338 bp, Homo sapiens
  misc_feature (1)...(338): n = A,T,C or G
ttattcggggacacaagcagangggattttgggggnggancctccctacgaatctacaagcgggtccctgcgactnagccnaaggtctgangacccaaacaagaacangaagaaaggcaaggacagagaagtgtggctcggaggtgaccacgnccagagaacagcgtcgnctcctgngatgatggacatgcacngatgagacngcacccagngctccatagcgagacggnctcccccatnttttttgagancagcagcaagctacagccctgcccaagagaccaacgcacccgggcncngngaagncaccggagccnnggctgaagagggcgcaggcc

SEQ ID NO: 1685 - DNA, 191 bp, Homo sapiens
  misc_feature (1)...(191): n = A,T,C or G
gccagcatgacgaagaatggaacanaagantggatggctagaagctttcttttgacgagagcatcaagaancatgccctcttagctcaaaaagcagcnatattttccagaacctgtcaagtgaccacanttttgactggtagaggatcatgaagatgaacacctacaaaaatatgcaagtggggtttccag

SEQ ID NO: 1686 - DNA, 481 bp, Homo sapiens
  misc_feature (1)...(481): n = A,T,C or G
gactgagggagaatacttcctgacccatcagnctataaatcctcactcatagccctgactgctcataattggctgcttcgtatatccgcaactacaggggaagtcctggagaaaatataccttgcttcctactgcaaattcaggtacctgagctgggacacacctcaggaggtcatcgcagtgaagtcggctcagaacaaaggctccgcagcggctcgccaggcaggcacattnaccacccgntttgttgtacctngcagtgttccggnttctgcccttttcacttgtagggattctagagatcaacaaaaaggtttttgagaatgtcacanatgctaccttgtcacatggaatcctgattgcgatgtacagntcgggactagtcagactctacagcttccaagccatcatcgaacagttcatgcaacagaaacttgacttagggngtgcntgcagacagggcgggactactgggactgta

SEQ ID NO: 1687 - DNA, 259 bp, Homo sapiens
  misc_feature (1)...(259): n = A,T,C or G
ctgctttacaaagtagagggacttccaaatgctatggttcatataccatgggatcttcnttctggntacctgtcttaaaatgaacagaagctctgccattngctactggcttntgtctctgacctcaacaggggtntgcangngttcatcatttgccagatgacgaagaatggaacagaanaatgganggctnngnagctnnccttttgacgagagcatcacnaaacatgccctnttanctcaaaaagccagtatattt

SEQ ID NO: 1688 - DNA, 289 bp, Homo sapiens
  misc_feature (1)...(289): n = A,T,C or G
actatctccaggggctcnctttcnaggacccttgaactgaggcacgaaaatgggcttgtnacttaaccggggaaacccaccacttttcccagcaccccttgtttgngtntatagggcantaanttcttgncttgggaatttttttttttttttttggaanaanaattttaccctgggaaaaggnncnaccccaggcttntttgggaaaaaattccccaangggnaantgggttttcccccccctttcaaaaagggaaaanaaaatcccctttnttggggaccccctttg

SEQ ID NO: 1689 - DNA, 279 bp, Homo sapiens
  misc_feature (1)...(279): n = A,T,C or G
cccctggggctgaacangtgacgcagccngcgctatnactagcntacgttgccgngttcacctgggcngtnatgtncacnggagagccacgcatatgannngcacgatagtactgtaagactcccaagnattgtnngttntanngttagcaacatnaccattccataaccggntaaatgatgaanancaaacangagccacaatatggatctacaaatttngttggaccaccagaggaagtaagttctttnctaaaaaaagattttaaaagttttcaaa

SEQ ID NO: 1690 - DNA, 172 bp, Homo sapiens
  misc_feature (1)...(172): n = A,T,C or G
actgagcatggactcgaacccaggncaggggctaggaagtaaacagaagaaactaccaactggagcaccatccacaagctgtgacagaagtaaaaggtggtctttaattacccatgtaggggtgttttcagcgagttcgttttaaaataaagtaagtttaaagaacaaaaaa

SEQ ID NO: 1691 - DNA, 156 bp, Homo sapiens
  misc_feature (1)...(156): n = A,T,C or G
cgtcccgccctcttctttcttctaccctaccattggctgatnagcatttattgacatgacnganaanaactggnatganctgnttacacatnatcancttaagcacntcaggagccnanggancctgcctgggattaaagaagtgactcaccacat

SEQ ID NO: 1692 - DNA, 438 bp, Homo sapiens
  misc_feature (1)...(438): n = A,T,C or G
aactgaggtcaggacttcttacngtcgngctctcancaggagtctgagcgnggtcctagagacagcaggagaacaatctntgcgggctcagagcctctgctgagggcccagcccccagttctaccagnggtacaattttggccgtctacccaacagcatcagtgttgatcggttttggaaaatggatgaactagtgtgttcacatttggctggttgtgtcaatgggaggctacagagttttcccatgtgactctgaaatccaccgcatctaagaaccgtttcctttgtctccatcanaatttagcagcttgtaattttccctcctgcttaatctgtatatgtacataaatgaatgtatgtatatatttatatgtatctgngtaatgtatctaagctatatgtgngtgcacagnaatgtatgtacatatagatatatat

SEQ ID NO: 1693 - DNA, 356 bp, Homo sapiens
  misc_feature (1)...(356): n = A,T,C or G
atggtggggttggagnccagnaagcccnctgaaggaagatnggccacacctcctgccaatatgaacccgcctcaccaatacagnggncagaccaaagagcaccacantgcaggacacgcctccttctcagcgccagtgtccatagctcantcgncctgggaggaaaactctgttcagagattagagggagcatgacaatgcaagtggacaaaggatggattatcaggaggaggctttctttgagcatgctcagaggtgcttccttgaagagattagaatgggggaagggggaggggattattcactcagtgtggaaaggaaagaagagaagaccatcttaagcaacaagtggcttt

SEQ ID NO: 1694 - DNA, 490 bp, Homo sapiens
  misc_feature (1)...(490): n = A,T,C or G
tggactctctaccacnatacatgaggcctgcgcaganggggnagtgcgctgacnggccnttactgctgnnnggancacnggctgaacctgnncatggcccanggactctatttctcatncatccactgnnactgaagacttcnnagngcancccngcaggggcctatccncattcctatgacaagtnatatgagtcnngcgaccatttccncatcagtaaccggctgacactgatgacagcgcttccctcgtgggctganggacagtgggacaaagccatttcaatgttgnggagtgntgagagcanactctgacacggcaggatgcttgatgcttggnagtgtaaactacatacactgctttangaaccgctcactgncttcttcaaaaacttagcatgggctagccaatgagatggctcagcaggcaaaggcgcttgccacacaaacaagagtctgatggaacccacgggcagaaccaactccacaaa

SEQ ID NO: 1695 - DNA, 226 bp, Homo sapiens
  misc_feature (1)...(226): n = A,T,C or G
gttttttccaggcccattggcccattggnattnccttgggaaccagggcctttattncccccaaaggggggggggaattgggaagnccccccggttggggggacacaggaccccttacccaagaactttttgccaggaagccaaaggaaggaaanggcaaacaaagcccacccgagttcaccagncctattggnatttcccttgaaaagaatgggaaggtgagcca

SEQ ID NO: 1696 - DNA, 236 bp, Homo sapiens
  misc_feature (1)...(236): n = A,T,C or G
gggaccggaagtccctgcctattccacccagctcattggctactaatatctttattgattgatcaggagccaattgtagagcaggtccttttaatgttcacatgtnaattccgatcaaggcatcagaaccacagacatgtgtctgttgtataggtgagaaaggtcaagggcaaaaatatattgtatcttacttgtgatagtgcaataaatgacaactgntgcttgaaaaaaaaaaa

SEQ ID NO: 1697 - DNA, 197 bp, Homo sapiens
  misc_feature (1)...(197): n = A,T,C or G
ccacagtactgaaggtggcggccganngacggccccaggtcgcagccccctggagccgcttctggagacttgggaagacccctcggtgcctccgggagagcagacggacgcctacctaactctgaccagtcgtatgactggagaagaaggaaaagaagtcattgcagaaatcgagaaaaacctttcaaaaaaaaaaa

SEQ ID NO: 1698 - DNA, 201 bp, Homo sapiens
ccagccgcagatttcctcctctttgggcatacggatctcagaggtttgacatgcgcatgtctaagcaccaccaaaatgaagatgtcaagcagttctgtcgtctctagaacagctgtcacggataccctgtgataagttctgtgcaaagattgtgtctaactctatatggatgacctaatactttaattccaaaaaaaaaaa

SEQ ID NO: 1699 - DNA, 376 bp, Homo sapiens
  misc_feature (1)...(376): n = A,T,C or G
cgctggagaaaaaatattgagccatagttctcatggnaatnatcngtgtngctttctcttattccttttcttatttacatgntcctggnagtggaggccaagatcttaagtgagaanaatgggcaagaaaccatccctagagatggggtcacntaacatgacctaatccccagggaaaccaacgctttactttctaaatcatttacaaaactattatgatagataaaaattttcccaacaataaaatttcatatggctacatgcgngtnattggagggggcttttggcatatagtaaanaaagccttagctagaaagagncaaaatggtttaaatttacatatngaagatttataaaccgtcaggcattagatgtt

SEQ ID NO: 1700 - DNA, 164 bp, Homo sapiens
  misc_feature (1)...(164): n = A,T,C or G
cagaacccacgaggccgagaggaanaagatcagaagnncaaggccggngntggngaaatggctnagccgagtaagagcacccgcctgntnttncgaaggncctggagttcaaatnccanaaaccacatggggggntcacaaccatctgaaacaggatgtgacac

SEQ ID NO: 1701 - DNA, 198 bp, Homo sapiens
  misc_feature (1)...(198): n = A,T,C or G
tttcttggggggaaaacggncccttcnnttcnaatnggccctngcccagnttttttttttcattcccccggaggaaactttattttcttttggcntttaccaanggggggtnctggcttacntnggagnatggcnttcttggccncaggnagggcttgggattcttatngnaaagaanaatttggctttttggaaaag

SEQ ID NO: 1702 - DNA, 177 bp, Homo sapiens
  misc_feature (1)...(177): n = A,T,C or G
cctgctgcacgcaccatgaatggacagatntgggtgaagtntcccctnccccanccngaaaccngcttgntnagagggtggagcnttcccactcagtcnttttgccacgcctactgctggaacctgncgntttgctgttccgaagccatcacgtnatcaccctgctactggattcca

SEQ ID NO: 1703 - DNA, 397 bp, Homo sapiens
  misc_feature (1)...(397): n = A,T,C or G
gagacgccaacgctttntctctagccagcccaggctcgcttccgnaagacagcgtctgtccaggggaggnccnctncgacngctntcttacgctnccggagacctacagccatggncaccgacatcgctgcagncaggcgctggggagcctctgtcccccagaggaattactcccgataagccgaggcngagaannccgnggaggagctggaagaagacgactgacatacgagctanactgagaccctgtcngagagactctggggnctgacggaaatgnttnccgagagggnncggacanncgccggagncacctttgacctatcntcttcggggntnaaaagatgtncagannnnacagggcagntntgtggattgngaccacttacttaatgat

SEQ ID NO: 1704 - DNA, 291 bp, Homo sapiens
  misc_feature (1)...(291): n = A,T,C or G
gttttgagacacgatataacccagtttggcttccccnncgagtcctcagtgacggcagcacaggagccgggntttgggtctgctcttcatntattccaagcactcaacaccgacaacaccatgacttcttagatccttacaaacacaactacatccaagaggngacatcacaagtgtgntctanggtttaccaggtacagaatcaacttgcaccgacgcacatncaggaacaggaacaaactggagccagggcaggccaggccagcncaacntntattttcatgaaaaaga

SEQ ID NO: 1705 - DNA, 291 bp, Homo sapiens
  misc_feature (1)...(291): n = A,T,C or G
ctcagcagaagatttcatcngtctaactaccgactatgaggcggcctgccnaggatgctantgangagtgccacctgnnctcttcctctaatgggacaaancngccccacctgttttctttttgcttggctgggnttgcttttgttnttgttttgtnttgggttttttaagacagggtcttactacatagctttggcccgtcctaaaactcataaacatantntgcagataatatttttaaatagatgagatctgctggcaatngcatcattgntagtcaaaaaaaaataa

SEQ ID NO: 1706 - DNA, 370 bp, Homo sapiens
  misc_feature (1)...(370): n = A,T,C or G
gactgaggcacactgatactgccacagnaaacagacaactccggcaactgcaagtcaaccccactggtggcatcttcagctagtatgcccatgagagctgctttgacccacagtctctgggaacaagaggactcaaatgagaacttcctgcaggctcctgtagccagctccctaggagagaacttgttgggaccctaatacctagccagagtcgggtgttggccctgtcttctatgtctatgtgtttgcgctgcctcctacaatgctgcttcctgcagtgggccaagtaaccatgggagcgatgatatggttcttacaccaagatgctcctctacttccaccaataaacctccaatggagaaaaaaaaaa

SEQ ID NO: 1707 - DNA, 222 bp, Homo sapiens
  misc_feature (1)...(222): n = A,T,C or G
aacgtgaacaagacagcataggatangataggcaggcatgtgtcccgggggagnatgcngggcacacngtgtaacatgcagcanagaaggagctaacgacaggaangaccagtgagttcanggatagagtgnactacngngcanantgnatgccancctatnagacatatgngagntccgtgtcttgaagaggagagaacagagaaaggaaaaagaagaaaa

SEQ ID NO: 1708 - DNA, 189 bp, Homo sapiens
  misc_feature (1)...(189): n = A,T,C or G
tgctttatggtctacgttgcaaccttcctnctgacttcagagcacctgctgtgtgcannccctcaggcactggctgtgctgctnncncgaggcccgtngagntttgaccttgggggntggagcgaccatacnaagtgcangaagccagcggnctaccacagacatttgattttcttatagaaagcgtta

SEQ ID NO: 1709 - DNA, 195 bp, Homo sapiens
  misc_feature (1)...(195): n = A,T,C or G
attttggggtaaccttgnctgcttttgaggtggaacccttatgancaaagntncaaagangncggatctctttcgaagactggnancncactgnacttanggntaaactggagaggagcttcaactctgtccacctgcttgcaggtgagacngggacccantgggaagggntcggacngttatgtcactgtacag

SEQ ID NO: 1710 - DNA, 186 bp, Homo sapiens
  misc_feature (1)...(186): n = A,T,C or G
ggtaccacgcctagcactgtactatanagagacacaactctttttccacgcccataaancacgcatacacttatgnnctggcctctgacttgacaaaggtcaaagnancttcntacctgaagagntttncctgaaggtctactataccagtcanggcaatagttactccctgccagcagacggaga

SEQ ID NO: 1711 - DNA, 170 bp, Homo sapiens
  misc_feature (1)...(170): n = A,T,C or G
gggctatgtctcctgcccatncccatcaaaggcgatttttccagaatgagnaaagccncgcgcccaggaaanccgagacggcanngagnggggcnagggataccacccaaggnaggcaccaccaggngnaagngccgaccnagcaccaacccctagcagcagcgacccgt

SEQ ID NO: 1712 - DNA, 263 bp, Homo sapiens
  misc_feature (1)...(263): n = A,T,C or G
gactgaggtgtataggctgagaaccggtgcccgtgtagttnnctatggtaggncagcacagaacgccngtgtctttatcccnngganccntanatacnnatggttgatgtgagacacatcacagcngcncnctatgnttctngctattntnggggcacaagccanatgacgctataggnataanngacactggctcangcatgacctccagagttnggcccattgcatacaggagaaaattanttcntttagtggccctctga

SEQ ID NO: 1713 - DNA, 283 bp, Homo sapiens
  misc_feature (1)...(283): n = A,T,C or G
acatgatccaacttcttccacactcagctaacagcggttcgctcactcgtgcnctacagagcanacactgcngctaagctgcaccttttgggagcaaagccggaggacagagtnacaactggatgggggcagtttgaaggagtcagcaagctcagtaaggtggtgcttgcttgagttctcagcattcttgagaccggaggcaggaggatcanagtttaaggactggctggccgtactttgagattgagtctcaaaacaacaaaccaaaccaaaaaacaaacaa

SEQ ID NO: 1714 - DNA, 183 bp, Homo sapiens
  misc_feature (1)...(183): n = A,T,C or G
gactgagccaagtctcaatccctgaatagagcccactacggggaatgtctcaggctacactaccagcatctttggactttatttcccactgacatagnnntaancanacttncatggnnngtaattgtgnaancacaagatgatgcaaggaggcatcacattagnanaatggcgtacttcagc

SEQ ID NO: 1715 - DNA, 191 bp, Homo sapiens
  misc_feature (1)...(191): n = A,T,C or G
ggggttttgggaaacggacccgnttngaggggaaacgncagacggagggcgcgccgnancgaggggttttagggngcggcanaaccgcgaaaagcgccgaccagncccaagcgagggggngnnccnagcngaaggaccaggacccagagaaagnccagggaacaaaagcaagcgaaaaggggcgccggaga

SEQ ID NO: 1716 - DNA, 307 bp, Homo sapiens
  misc_feature (1)...(307): n = A,T,C or G
gctttggtttagtttctactgaggaanaaattccacatnagcattaagtgggnggagcaaantcntncaatgngatannagcatttngtttgtggtggagcntgataaagggcaagaggaaaatattctgtaaaagtgcgccattggagccatagaagacactcggatccctttagcctgccacctgggttctgatcaggancatctncctaaagatccatcagaatggactnggaagccccacccacactnctgcagcctggntgnanantgcacagtgaggaaggaggtgctgaccatctctgtt

SEQ ID NO: 1717 - DNA, 502 bp, Homo sapiens
  misc_feature (1)...(502): n = A,T,C or G
gagatggtgcctcacttgtacactgtanggaanacactgtcatcagctagctatccttcgctctatgactctatgactgactagtgtctgccgaagccctctggatcagccccaggatcccagcttctgagggactcccttttctcgtctgcaccataaacactacccaccatagcaggaaacagtgagaacagtcattgccctcatccccaagggaagtcatgccaatttctgagattggaggatgaagcaggaccagggcaccttagcctgactgagaaagcagagatgagcccctttaaganggccttctncatgctcctgtggttgctccccccacttcacctgtcacaacatcctttgaggctgtcacttttgttgtctctacactggtcttctctccaggggatacaggatggagttctttgtccacntctgtagaatgaacttggcagtaccctctagatgaccacctctcacccagattcccggaacagctgct

SEQ ID NO: 1718 - DNA, 376 bp, Homo sapiens
  misc_feature (1)...(376): n = A,T,C or G
cttttcatctacctaaggngaccagcctgtgctacatgagatcctgtcataaaantcaaagcggagatggngatggagganggaagaaggagaggaaacgagaacgcatttgaagagtgaatttttgaatttctgatcctcctgaatccatatcacngaatattaagatcacaggcatgcatctctttacccagactacacccagagtttcttgcatgcagtctacctactgagctacacccgcaacagctggacaaatataaaggcgttggcataaatgtatagcaagttctggcatttttagcgtcatctggaatttatatcactatctgcaaaangataatgttgaacaataaatgtggcttttaaaggtctt

SEQ ID NO: 1719 - DNA, 504 bp, Homo sapiens
  misc_feature (1)...(504): n = A,T,C or G
gactgagggagaagctgggtcatggnccccgcatagccagagctttggaacgcctgaccagggacctggagatttggcaatagcacccgcagggaaatgacagttctttgtcctggccacttgatcccctccttttggactgctaagaggatacaactaccctggtcatgggaatggctggatccgtaggactccgagacaatggcttggccagagcacgtgggcgagcccaggaggctggcttgggtctgcagcttcctgggaggaagtgaggcattgtttcaggggctgtgtgggcccgctggaactcagcacaatgcagggagcgtgggtgccaggtctagcccacccgacaatcagcagcttgtttattgctttaatgacccagtgctagatccacctggaaacagacctgctaatgagcggagacagagctggctccgccccaagggaagcctgtcgggccagctcccctggaggcactaagggtgtgtggtctgagtg

SEQ ID NO: 1720 - DNA, 245 bp, Homo sapiens
  misc_feature (1)...(245): n = A,T,C or G
gccagcgaattaccggagactatgccctatcntactgantgacctgcggntggagtccanggtgcatggcacgatggacncgggaanggactnttcccagctttttgncncnntntttnactnangcganattgnnattaaaaattncgagccacngatacatgngcatnntgaagngaacaccctcttttccaagattattattctaactaaataatacaatttaaatgattaaaaagaaaaaa

SEQ ID NO: 1721 - DNA, 155 bp, Homo sapiens
  misc_feature (1)...(155): n = A,T,C or G
tggaaaaatccaaaggcaatatagctgtgtngattggcatctacttaaatactcncccccaacacacagagaaanagagnagcgggngattatgtattcanngccangtaagacatcacctgtacttcttgagantaaataacatttgggtaggc

SEQ ID NO: 1722 - DNA, 169 bp, Homo sapiens
  misc_feature (1)...(169): n = A,T,C or G
gctggcccagctgcctgccagcctgaggtgaactctacagatgagaatcttntcaagnattacagctcctgaactgccttctactaaatnanacttgngagccanacgggcatgcacatggattcttgtgggtattaaagcttngggtctgttaccagcaaaaaaaaaa

SEQ ID NO: 1723 - DNA, 291 bp, Homo sapiens
  misc_feature (1)...(291): n = A,T,C or G
gcatctcaggcttcttgtccgngttcatggagagatgacgcctgttcaccactttccctcttcatctaaggataacagcttgaagagtgagctgtccacacagccttcaggatcctcagacacctgctgctgggtctcttactttttgtcccctcgtttctgcaatgtcctctggtactaatntgggcctctgccggcagatgttttataatgccctccttttgcctataccccgtggatattttggtgtcttctcttataaacnttgctactggaagttaaaaaaaaaaa

SEQ ID NO: 1724 - DNA, 293 bp, Homo sapiens
  misc_feature (1)...(293): n = A,T,C or G
cccccagtgggcccagnccggntgctgagagtgtccagcgncacaggatgtctgatagcatgggtgcacagnggatgccttnggatgatganagggacaatggccgacaattcgtgccnnacccagcanagtggctgagggagcangcccacancacatngttgactgcaacggtggctgtnttggtttgaaggcaatgctgagttgtgccaaggctagcgtggccagcttgtaggcccgcagaggcaggcctcgatgctncatataccgtgcaaccgtgaagaggcgggcgt

SEQ ID NO: 1725 - DNA, 156 bp, Homo sapiens
  misc_feature (1)...(156): n = A,T,C or G
cacgtgaaatctggggaatggagagtatatttcaataaatgtgcataancnnagccagcgggcangnanncgaattcgnnccccagcaccgncgtgtnggcccagacagangangaatnggactctccagcgtgccntcggtgtagcgggtacata

SEQ ID NO: 1726 - DNA, 464 bp, Homo sapiens
  misc_feature (1)...(464): n = A,T,C or G
gactgaggactgaaagatctcatttgatcaggattcagtactacgtgtatattctaacctgctttacctgatctacagaattagattcaaagtacagtnagatagcaccatccttttttggngaacagctttgggactggatctccgggttgtatgtgctccagnctttaaatagaataccagagagcagaggtcaccttgcccatcaccacagatgccaatgagcacaaacaggaagtgattcttcagtgtgcgctttatcaccatgaaggcagcagattaatatcctagagatacagcgtatacctcatttggtcagcagattatctgaggaactgaaacaaaggcagttagccattctgagctgggcttgcatatccccaaggctgctgaaccctgcatttntnttcagcattatctgggcaaagggttaacgaagaaganagcagcagcaacatgtagac

SEQ ID NO: 1727 - DNA, 311 bp, Homo sapiens
gactgagatgcatcactctgggcttcccgactcttcctagaatcaggagaagacagaggatgaagcacctgtgaaaatggaggcagccatccgaggggtatgtctaccagccaaggagagccgttggaagctgtggtcaagagagcagatgctcctcatatggctgtgacaccttgatcttggactatatgaccggaagaaaatatgcttctgtcactggggtatctctcattatattctctgatgctaacaccagcactggtcaaaacagtgtttataaacatatgctgttttccatggaaaaaaaaaaa

SEQ ID NO: 1728 - DNA, 362 bp, Homo sapiens
acctggaagcttttggagttgcagcttgacagtggtgtcggaggagctggctgggttttgctgtttttaaatactggctacacggtgcccttaaaactgtctctgaaggagaagactgtggccttcccccggcacagaggtctgcccactcgctcccatggactcgagtgtttgcagaccaaaggtcaatttggtttgtgaattgctcagccctatggctgaaggtttcagacacccgatacctgccatggtatggttatttcactcttactgctctgtttgcatcttttactattagtttttgtacttttatttaaaatataaggaagaaaaacctgaataaagcgcttgaatctgttgta

SEQ ID NO: 1729 - DNA, 509 bp, Homo sapiens; identical to SEQ ID NO: 15
  misc_feature (1)...(509): n = A,T,C or G

SEQ ID NO: 1730 - DNA, 150 bp, Homo sapiens
  misc_feature (1)...(150): n = A,T,C or G
gcgagctgaggtgacgaccagtagcatgactcaagtggtggatggcttaccactcggagggagtggactgagcagcngncacgtgtnttcagagtttttnatnaggaagagaatggctgngcggacnttttttatccgtggagagagact

SEQ ID NO: 1731 - DNA, 190 bp, Homo sapiens
  misc_feature (1)...(190): n = A,T,C or G
tcggagagaagccgcngggggtattcccttaaagaaaagtcagcgctggtttatcactgnctgtgctcactgacagacgccgaggccatntatgggactgcggattggtccgcacctggaatcaccttcctnatntgggntccctaaggctntgcctaaccccgagangccgggcttaatttcaagataa

SEQ ID NO: 1732 - DNA, 207 bp, Homo sapiens
  misc_feature (1)...(207): n = A,T,C or G
atacaggtaagaagcctgncctangccngntncattgcttatcaccctctgccgagaatgcgngcaggagctgnngacntgcctttcaggcctcatcctacngngacctgcggcaccggaagtnctggnntgggtcgnacnaaccactctccntgggaaggaaggtccccactgccncctgggacaggatgttcaccgaggccttct

SEQ ID NO: 1733 - DNA, 174 bp, Homo sapiens
attgaggagctgaaactatctttggagagcagcttgctcaaaacaaccaactgtgtgtagagccagttataacctgaatatcaaaatgataaaactttatttgtatttttttaatccatctatgggcgttaaaatatgttttcactaaatatttttattacattaaaaaaaaaa

SEQ ID NO: 1734 - DNA, 445 bp, Homo sapiens
  misc_feature (1)...(445): n = A,T,C or G
tacagggagccggaatggagtgcagagtctatcttggagccctccagaagggaaggagagctgacccaggtctgatcctggtagtgtgttgtttgggacatccctanagagcctgatccttgntctatgattgatgacccctgagccagccccaacccagcagggagccctggccatttgctgtacccatncctgcccccacctcaggactataggagtcaacctcctccctcagcctcttcctcccagggagcanngccataagggaggggggcacctccatggcgactctctagaaggccaggcctnagggggtggaattgactnggggggttgncttcacntgagctgctcccacagnggggagngagtcggctctcagcnttacagttgatggaggnaggggcggccagatgaggtgggntggtaccccatgggcatgctg

SEQ ID NO: 1735 - DNA, 411 bp, Homo sapiens
  misc_feature (1)...(411): n = A,T,C or G
tggggggaaaccggaaaaaagaaggcgcacanccacccgngggcntttaacgcgncagcaaaggccgaaaaangcccagggacggagcccccncgcggaagccaccagcnanggagacagacagangaccacagcncggccaaggaaacccaagcagcaagcnagggagagngcnggagannaacgaccnaggcccgggnaaaagcccnaataagagcggaggcgacgncnaccgcacaaccnccaccgggaaccccaaagccgggagccancgngcaaacngaacgggggancccngancgccccgcgnnacaaaccaagnncggaagaanccaccgnggccccnncacanngaggaagagaccgaaanncgacaangaaagagcccacggnggggaccccaagccggag

SEQ ID NO: 1736 - DNA, 334 bp, Homo sapiens
  misc_feature (1)...(334): n = A,T,C or G
tgagccccggcttgcctcccaggtgaacccagtccatgtgaactgcgggtcggcttccaacagaaaggaagaaaggaagagatggaagaaaggagagaaacggcagatatacagtgctgaaagaaaatgacagccatttaatcttacaatcaggaaaacctatgtctcgaaagcttaagatggaataaacttgnagacnnnnaacccccccccccctnccccctcnngatttcccctttnnccccnncncctnttttnttccccnctctccnntnatttntcccccccccccctncttttctttnttctttnttttnccctccctcttcccccc

SEQ ID NO: 1737 - DNA, 255 bp, Homo sapiens
  misc_feature (1)...(255): n = A,T,C or G
acccatcgggaaccttgcccagacacaggcaggctgtcagataatgagaaaatgaaggcgcacagggctacagtcngaagccccagccctggatgacctggaccatcgcantcagatgactctctctgacctcactagtgtattctgacgcagatgatgctaccacctataaaaatgaagaaatctgatgaagatcagcctgacnggtgcnacactgccaacccctcagatgtatnntgaaggttcatgagtctt

SEQ ID NO: 1738 - DNA, 251 bp, Homo sapiens
  misc_feature (1)...(251): n = A,T,C or G
gatgcagacaagtgtaagtgnaggcatgaanttggagagngccattgnananactatcacagaaagtnacccnacaaactcctcaggaaaagcagacggctgcacnanagctncgaaatgccaacacctttaccagnattntggccatgaggnaaagangagtncngtgtagcctgggtttgcggatgtccaagtctgagtccatantccacacccagtcctctgnggaaacactctacgtctcacccaca

SEQ ID NO: 1739 - DNA, 292 bp, Homo sapiens
  misc_feature (1)...(292): n = A,T,C or G
ttttgaggtaactcttcgagtaanntttggagcanaaactgaaccagangcgntaanaggagattgnccgtgcggccatgatgatccanagctcacattttaggctacattnncatnaaagcactatntaaaaggngctttgtggggtggtgacnatncngaacatntactgaagatttccttgggaggannaangttttgcatgctgaaaaaggcacgccttctnagntccagaagcaacctgcgaggacagcatggcactgcagttttttacatggcagcctgttggctg

SEQ ID NO: 1740 - DNA, 222 bp, Homo sapiens
  misc_feature (1)...(222): n = A,T,C or G
tgcctcggatagcattttagaagggacccagagggataaagctttaggatgtgccgcactacgggtaagtatagcctgcttgattgtgtggcccacacaaagccaatgcttcttttgccacatcagactgggtatggnggtacatggcngtancnanancatnnngagagnanggcggcctagtttcataaacagganctgnntccagcacctataagaaca

SEQ ID NO: 1741 - DNA, 198 bp, Homo sapiens
gactgaggatcctgtgacattgggagatgtcagcctttctgggtgcacatttctcaggaggacagctggttccacaaatctccagaaatgctgtattgagatttggctcagcctgtgccttctctaggatgcctgcagggatggaccccatcaccctgtttatcatagtaaattcttcagtgctgtgaaaaaaaaaaa

SEQ ID NO: 1742 - DNA, 313 bp, Homo sapiens
  misc_feature (1)...(313): n = A,T,C or G
gactgaggggacttcttcgctgatggagaagccaatacagaccacctggccagcgagctggatgaagcggtgggctccagcgagtggctggccctaaccaaatccccccaggctttctacggtggtcgagccagcctggcaagggtcacctggagtggttcggggcagcagagatgtgttggctggcctttccagcagttgctgcgagtggggcctgtagcaagagccaaattagcagcttgtgctaggatcagggttgagcaatggagaagcgggccgtgcctgcnanctgntgtcacctgtgcgatgtttc

SEQ ID NO: 1743 - DNA, 238 bp, Homo sapiens
  misc_feature (1)...(238): n = A,T,C or G
aagcaagagagggaagcaagagagctgagaaaanccgaaaccccttctattntaaagagaacaaccattgcctagggccgcatcacctccnctgantgngtgcagcccatggncgagctgacagtncacggnaanaacagagtacgagnanncgcagatacaggncgagcctgnntnggcctcagggngagaagatgcaccttgaagccccagggagtggggagggctggtggggtgt

SEQ ID NO: 1744 - DNA, 181 bp, Homo sapiens
  misc_feature (1)...(181): n = A,T,C or G
ctgctctgcctgcctgnctgctctgcctgctgccatgttncccaccatgctganaacgtgactaannacctntgaaacctgatagnaagccnccaattacanngcgttnattctctancanncaaaaggnaaataaatggccgtggagccaacaactcaataggaaatgaaaagaaaaaaa

SEQ ID NO: 1745 - DNA, 258 bp, Homo sapiens
  misc_feature (1)...(258): n = A,T,C or G
ggcattcggattatgtggaaccagnctacaggncatncctgaaccaccgcgaggatgctgggacttcaattccagncttctggangaacatccaangctcctaacagcgtgaaccatcttctccacctactggnttaattcttctntattaatcattgatttgagatacagtctcatgggctgtcanaactcagaaatccatctgcgtncgcctcccagaggcagattaaaaatatgtgccaccgtgaaaaaaaaaaa

SEQ ID NO: 1746 - DNA, 311 bp, Homo sapiens
actgagatggaggctccacaaagagtaactcctgcaattcttcaaaactgcctttcgtactcactcatggctagactcgctcccgcctggaataggacaggtcatctcttggtacaaggtgactttgtgtttgccaaccattgagattttttaagctaggttacttctagtgtacctctgttttttattttaaggattcttacttttagagaagagttttagctccaactctaaacattgtcacacaagcccacaattctttcatggggataatatacagagtcctattgctgttgctttaaaaaaaaaaa

SEQ ID NO: 1747 - DNA, 542 bp, Homo sapiens
tgagccaccattacataatccccctgtaatcgctgactcgaagcacgactggcaacggcagaaaatccctggagttcgtgacaggaaggactggccagcacaaaaacctctgccaactgccagaggagtcatacgggccctgggaaatccctcccccacggccttgcaggaactgcagctctgggggaagggagccccggcagcctggccgggaggaggaggtattgaaatgggctcagactctaaccgaaggtgctgaaggggcgccttgcccagacacccgtatacttgattttcttcctaatggagtctccagagccatgaacctttccaaacactaattcctgtcctctaacagcttctgaaacattcctgcaggatcgggagaatgggcacagagccaggaagctgcgttgtgggcacaaagagcacccctgccccctgcaaagctctgaagatgctagtctggaacaccactcagctggttaagcgttttgcggcccactagacagaggaggcgttctgtgctcattggcagtgat

SEQ ID NO: 1748 - DNA, 279 bp, Homo sapiens
  misc_feature (1)...(279): n = A,T,C or G
ttagagacgctgaaaaccgggtggnagngccacatctggagacgggatgnaagaanaacgaggcanaaccggatatggactncanaagaaaggagagctggttnaggaacacaccattaacntggacgatgcctactcagaagggagaaanagaagcgnttttttncacgtngagtgagagccacancagccagcaggganacatctanagggangnttgcaagcaaggganaccantgccancggtagggacatcgcncgcgagatgaggaaaagtga

SEQ ID NO: 1749 - DNA, 208 bp, Homo sapiens
  misc_feature (1)...(208): n = A,T,C or G
tcacctggcaccattcatgcangagcgttgctcatcttccttgnctgtcagctggagcatctctttgtagtaanctgtcttgacccaagaccggtgcagcctcatgcaacaaanatgncatncttgcannacancggngacaaggacgtgaaggcanctntganacatgaatgctaannanagcagancctattgccgccatggactg

SEQ ID NO: 1750 - DNA, 451 bp, Homo sapiens
  misc_feature (1)...(451): n = A,T,C or G
ctcagccccaaccgttggcagccttcctcagccctcagctgactgcantcgaaagtgtattttgaaaacagcagagcctcattataataanaagttaaattctgtctagcataaacatgttagtggtacctttaccagaatggattnttgtatatttaagacagggtctccctacataaccttggttggcctggagcattgtataaaccaggctggcctggcctcacagagatntgctcatctctgcctttacgatgctgagattcaaggcttgcaccatcatgctgtgtgtgtgtgtgtatgtacactttttataggngtcttttatcactgcanggaattntagaatncaaattgagatatgtctcangagggatntgtntaatcagaggatgttccacnatattgnaaataangacaacatagcngngcttttagaaccaaaaaaaaa

SEQ ID NO: 1751 - DNA, 223 bp, Homo sapiens
  misc_feature (1)...(223): n = A,T,C or G
agtaaaggccaagcaaggctgcaaatncaccatccctgacattgttgagctgtgaaacaagtatccacagcatccacccacaaggcttcctgtgaggaaagaagaccttattctgacaaaagcatctctgagccataaggcaaaggcntcccggagctgtgaaggacctgttacagggattcaacataggcatcaaaggtctatgtacttaaaacataaaaaa

SEQ ID NO: 1752 - DNA, 161 bp, Homo sapiens
  misc_feature (1)...(161): n = A,T,C or G
tgcatagaaaacataataagctgctgttgcagcaggnatgcaggcagnnccaagacctggagcgtgaagtngntgnnngtgganccntgtaggagatgcgcatcgctgctgcatgaaggagcatgtgcttgnnctntatgagtacggatgaccgtgaagca

SEQ ID NO: 1753 - DNA, 334 bp, Homo sapiens
  misc_feature (1)...(334): n = A,T,C or G
agagcacaaagtcagccctggaaagaagaggagccagtgtcaaccagctggatggtgagaggaaaacgtggaggttgncagaaggacaaaggaaaggcggcctacctctgtcctgagggaacgaaagagcangtggccatttncggagagctgcacctgctccctgcaaggcctgtgaaccaatggtggtttgccttcaggttaacaaaagaaaaggaatcctttggatgttngnccanagccttntnttttggncttatgctaccaccctgatcaatgtganacntacntnnanngaccctgaaagaggcatagctcttttatgaaaggaaaa

SEQ ID NO: 1754 - DNA, 399 bp, Homo sapiens
  misc_feature (1)...(399): n = A,T,C or G
tattgtgcgtgctgctgttgtnccttgggcgtgagcagcccttccagagaatccaggcactccagngncaataccngatgccgaccgtgcctgactgaagaacgattggatcagngngagcagccttgagatgtagcaganatgctggtngaatcaggnccatctacagggaactnnagggacnagtcatatggaatcttgccacgacacatnganngagacagannncagaanncngagactgaacctgatncanncactntacangacnggtactgcngacatggcagaggactanaggacnggcatnagnctcaacttggagccannagactncaactnattgtgcgtgacncacacacatgaccgtgggccaagctggagtcacttaattgcctc

SEQ ID NO: 1755 - DNA, 283 bp, Homo sapiens
  misc_feature (1)...(283): n = A,T,C or G
aacgaggagctgaacacatcgcgangtatcganngcganactnaangaggcacgtgagangaaantgntcccctgacagangacttgataantggtgctgtgctngtattaaatagncgnttgntacctttncaccctataaagnttacaatgaanagatcctgnctctntctctcttncctccctgcctnnactaggcaccagagaanagcttatagcctggcacacaggaatgctataaattgtctgtaaataaagaagaaagtgtatgtaaaaaaaaaaa

SEQ ID NO: 1756 - DNA, 349 bp, Homo sapiens
  misc_feature (1)...(349): n = A,T,C or G
gtttgagggacccataacccttgttttctgggggntncaggnggngctcgagactagcctgaaacccgnaaggacttggggtacactgtcttggtnaggctccacagaaancagaagatntatncctacatggtaagcaacatatannattantgttagtgctaacaaatttcatcttttgaaggctgttgcatcacaagggtgcaaaanggatacaggctagactgagttnnttttgncccagcattgatatcagctangggttgacagtgnaaaatggangtggaaaatnctaaacaggcatttgtctacagtaaagaactgcatcaggaaggaggagtagggctta

SEQ ID NO: 1757 - DNA, 171 bp, Homo sapiens
  misc_feature (1)...(171): n = A,T,C or G
tttaagccagcacgcaccgacctcgaaggnggggcaggatccaggnccgacccccgtgggtcccattccttcacaacatttttttctgtcnggnngaaagatactaatgatnncgnntnnnntctnacctgngagagccggtgggagagggaggtctatagtaccctgatc

SEQ ID NO: 1758 - DNA, 218 bp, Homo sapiens
  misc_feature (1)...(218): n = A,T,C or G
atccggccatcctgcatgtttggangccnagccacacnagantntntcatacaacctttctgagnttttctttttacccatttctcatctcaaataacaaattcctaaaggcataatttcaaanaanacacntcataannttacgggacctgaaggcnacctncccaaccttcccttgctaccgnntcattcatncattnattctgaacgcggtatgg

SEQ ID NO: 1759 - DNA, 496 bp, Homo sapiens
  misc_feature (1)...(496): n = A,T,C or G
gactgaggtggggtctttcgatcagagagaanaanagaagaggannaggaagaggacgaggatgaggaccaacaaccacatgntnnctaacaacctnntgtatcgngatcctgactccctcattntggngngnnncgannacagngtgctgnntactgacntntaataaatatttatattaatatctttaaanaaanccacattnantgaancatggaaacaccgtgaccttttacagccgccatnctgttccctcctgttctccaggggctggtgtttgttacancctggcctgggctattcattgttgtttgagaaatacagggggaaagggcctgttggtcctttctgacaaggcttctcctcggcccacagccagcgtgagtcancncaccacacaatactntttatgagctccagtancgtgaagaagccctgagaatccctgtggaaagggtgggggcaactgcctgtaacaatcccagaacagagtctt

SEQ ID NO: 1760 - DNA, 475 bp, Homo sapiens
  misc_feature (1)...(475): n = A,T,C or G
gactgaggatctgaaatgttttgctgcaaaccagtgcatcatgaacggaagctggaaaggctaatgtcatgcctgnagaagatgagaaatacaactgagaggtgaatgatgaagagtacaagaaattaaagactatttaaaaatactataanaatgataattatntgnattgnncgttnccattttatatnnnacttgtgacaaatatttcacgaaatcttantatttnctgatanaacagtaccntacntttaccatantnnttatganaacatnatcgagaaggatctganangtnttgctgcaaaccanagcatcatgaacggaagctggaanggntaatgtcntgcctgaagaagatgagaaatacaactganaggtgaatgatgaagagtacaagaaattaaagactatttaaaaatactanaataanaaattancggatcgtcccttccnttttatttaaaactgtgaa

SEQ ID NO: 1761 - DNA, 171 bp, Homo sapiens; identical to SEQ ID NO: 16
  misc_feature (1)...(171): n = A,T,C or G

SEQ ID NO: 1762 - DNA, 207 bp, Homo sapiens
  misc_feature (1)...(207): n = A,T,C or G
gactgagaatctcgtgtccagnacccagtgttccatgcctggctcatttccgtttgttgctatatcgattagtgctctttgggaccgcaggccctggatctcaaggttaataactagttgttttttgattaccactcaaggagcatnnnttatcctttgttattacaaataggaccacaattatataatattgtgtgtatgtcacca

SEQ ID NO: 1763 - DNA, 159 bp, Homo sapiens
  misc_feature (1)...(159): n = A,T,C or G
ttgtttttttggcccttttncnaactnattaagcccaggttggttaaattaaattaaattccttcccccaggttaaaaggccccatttcccctttggggggggcctttttccccnanaaaaggggccccaccaaaccatttcttaaagggccccctttc

SEQ ID NO: 1764 - DNA, 162 bp, Homo sapiens
  misc_feature (1)...(162): n = A,T,C or G
aactgagatgaatcctttgacantacccgtaaccccctggcagatactccgtttacaagagactacacccagnatcagttatttccagatcccgctcannanctcctggagtcctgaaagacnttggaggggcccagccancanacacgcagtccttgtgaa

SEQ ID NO: 1765 - DNA, 229 bp, Homo sapiens
  misc_feature (1)...(229): n = A,T,C or G
attcctacagctgatgaaaccacagccaaaagaaccgtttgggggcacgnagnctgagacancctggacnngcacacanagaaactgcgtggcagttctctagagaggccaggacatgtggactgaatgcaacagtccctggcttnccttgaaatgctatattgtgaggggtgtcaattacctaggtccccaagtatgaccaagataaaaaacaagaacaaaacaaaaa

SEQ ID NO: 1766 - DNA, 253 bp, Homo sapiens
  misc_feature (1)...(253): n = A,T,C or G
taaaaaataatggctttgangtactgtaccataatatanaaccttttaatntcacttcatctacatacaactggttattttttaaaataatatttattttattaacgcctaccttgngttgtatatgatgtatgnagaggggaatgtacacatgtgccacagggttaggacaactttgtagagtnaggtccctcacttgactgttacatgggttttggagatcaaacttaagttgtgatgcttgcatgtgtgg

SEQ ID NO: 1767 - DNA, 482 bp, Homo sapiens
  misc_feature (1)...(482): n = A,T,C or G
gtaccgccagggtcatcaaggaggntgnatcatcacnaaaagctgatgctgncctgctccaggnccccaagtcatccaggacccacgcttgttggcngctttaccaccctggcccagaataccactctttaggaaactactaaggtggctcgcacccccccccacccccccaccccngttccagcctgagaggaagaaagaaatagaatacaaaggcaagggctggtacnagtttatttaatacctnaacccagaccctccatattggccctattcggcacgtgctgggcagcatttttgtatacttgagtacgtggcctgacatggccaacagntacccttgatttacatatacttaaagaaaataagaaagctgtagnctcttctaaaaaccttaacagattttgatttccccaaccattggggtacagnaacattttaataacattgtcagctacatttaaaaatcttcagtattaaaa

SEQ ID NO: 1768 - DNA, 452 bp, Homo sapiens
  misc_feature (1)...(452): n = A,T,C or G
agcaagcagcggcggagtgctgaggcangacccatggaggacacatgacgtttggaggaagantaaatagaacttgntagtgacanaggctgngctaggcttgcttatagagcaagcctgtgaaatgcaagtaggnctcgagtctttgctgatctctgcttcactgagagagacacagctgagtacaactcttggcattctgggtccctcatgctgctgattcgtgctgaggctgangctgaggcctggctgtctctgctgggtagagccaccactgctgattcatattcgctatcctgactctaccgaactggactgctgatgtatccctgaagtgtttgtgagtggatcgagctgctgctgctgacctgtaggagctgttccaaagaacctttctaaacaggtccacttcccccatatcctttctttcccaccacctctggtgggtggtc

SEQ ID NO: 1769 - DNA, 165 bp, Homo sapiens
  misc_feature (1)...(165): n = A,T,C or G
atctaatttgccagagtcctncatgnttctttgtcgccatacacatnttaaatgnaagncnntntattganataganttatgnacnagacatatgtgccaaaaacattaaaaatggaaaacaatttttgaaataaaattaaaacaagacatattgcaaaaaaaaa

SEQ ID NO: 1770 - DNA, 338 bp, Homo sapiens
  misc_feature (1)...(338): n = A,T,C or G
gactgaggctgccccctccaggccatgtggaattaggatgaaactgcttccagctgctcagaaggagttgtcagactctcaggngagggcccgccangcgtcagccccncccntcctgcaatgctgaatatcaagcagncacaagcacagcagacgaagctgcttctgggaagatggtggttgtttagcttggaggacagtgctttgcaagaaagcctcccccaccacacactgctgcctcctcgtatggtcctgacccaggccccaagcatcagagctgaccaaccgaagcctctgagggtgtgagtcaaaataagccctccttctttgtgagctgg

SEQ ID NO: 1771 - DNA, 425 bp, Homo sapiens
  misc_feature (1)...(425): n = A,T,C or G
actgaggctggtgctaactagaaatgaagtcttgaaaagtgaaactctgaagaatccactcctgtacttgatggtcctggaagcatgagccagccatcacaccagccatcacaccagccatcacaccagccatcacaccagccatcacaccagccatcacaccagccatcacaccaccaagagctgtagtatggaggagctaaacttnaccgagaagcggaagaaaaacataagctactggggggatgcccttgnnccggtcccttcctatgcttcttcctactccctggntgacttgagtnaagaagctctgttctgctaacatccttccatcatgatgtacaacgacctcaacccaggtttaaaaacatngagccagtgatcangaactgaaacttncagaattgtgagccaaaataaataaa

SEQ ID NO: 1772 - DNA, 443 bp, Homo sapiens
  misc_feature (1)...(443): n = A,T,C or G
agtaagtggatgctgttccgcccaggccactcacagtcctgcagcccccggctccccctntggtccagccccagatagcagcagctagnctcggcgctnagggaaggatgctccaatggntggccttcccttggagactgcgacgacncgcnctctgacctgacagtaaccgtctcgtgcctccactttcgacccgggcccgcgcacctccagcaatgtntgcccnggggagtccccgagagtccncaagngtncccgagcgtncccggtccccgactcacacccgggagcccnacttnctctaccccggacgcgtgcagccnctcccagctaacaacnaggccccagacgcgccacgccatcgcctngatcatctaccacatgaccaggtntccacagcgtggttcnatggggcntgcagactccttacccagggagcttgt

SEQ ID NO: 1773 - DNA, 230 bp, Homo sapiens
  misc_feature (1)...(230): n = A,T,C or G
cagcaaagcgcacacagtgctncgctctngttgagcatggntcnggcnagcattgatgtcngtaaacngnaagnactngtggnaggaggancngancaagttcaaagccagtctggngtacatagcaagagcccaggctgtnctgncctanatagtggcaccctgtctttagggacaaaacagttcggtctcacagaaatgatttanaccagnattccttaaactttcta

SEQ ID NO: 1774 - DNA, 415 bp, Homo sapiens
tgggaagtatgtgccccacacccaggctggcattcctgctaatgaggaaacacgagattctctgaagaaaatgaagtttgtcgggaggacggtacctgcacacccaggaggagcaccatgagggatggtggagcacaggaagagactgagcagggagaagttttaaagccaggaaagagatgtttgtgcactgctttgaaacaaagctccttagtccactgcggcactccatggccgatcaacagtgacatagcctgttgccgggagctgtctccagggagcctcctggctggaatttcttgtgttttcagtctgtgtaacagttctcagcagagcacatcaggacccagagagtctacgatagccttccttgtcggcagccaaaattataattataagcctccaaaaaaaaaaa

SEQ ID NO: 1775 - DNA, 258 bp, Homo sapiens
  misc_feature (1)...(258): n = A,T,C or G
gactgaggaccagaagatggcacaacgggcaaaagcactgtcttggcttgcaagcctgacaacccaaggctgatctctggaaaccatgggcacacatgtaatcccaggatggctatgggatgggaggaataaacagatgctggaagcttacagacaagctaacctggaatattctgagcagtagcaacaagaaagatcccagctagcagcagtggnaagtaaacttatgctcaagagttttcctctgaaaaaaaaaaa

SEQ ID NO: 1776 - DNA, 506 bp, Homo sapiens
  misc_feature (1)...(506): n = A,T,C or G
gactgaggagatttatcttggggcactgcctcgcccggngttcaaatcgcggttttggttttcactgccttccgctccctgtcgagcgcgggaagctgagcctgccacctgctgcctccagctccgccatctttccactctgagtctacctcacctgcatcccagacgcctggccatctttgttctcctaccttcctacaaacataacttttagctgcttgactgtcttagaggagggaacagctgtgttcagctcctgttcccatacttgggcaccgtccaccagaggcatggagcatcctgcctcttggtccgcagcagagagtagcacctcatttgggtcggtaatgtgccccagatacgtggccctaatacacttcaatgggaacagtaaggatgctgatcctgctttccaaccgcagtggtgaagggctggatggcaaccacgaaattctttttaccaggtaatgtggacatcacagtaaatgacgatgagccacagctgt

SEQ ID NO: 1777 - DNA, 189 bp, Homo sapiens
  misc_feature (1)...(189): n = A,T,C or G
taatatgactcaactgcaaaanggccctcaatgctcacagatgcgagtgagccaaagagctaccttctgcttccactgtgacagtgcctgtcttctcatcacagtctactccttcccctattgcatcatcctggggcacaccttactcagagagcaacaattgagtattttgttttgtaaaaaaaaaaa

SEQ ID NO: 1778 - DNA, 172 bp, Homo sapiens
  misc_feature (1)...(172): n = A,T,C or G
aatgctgtgggacgtgagcaacagngnacagaaganctccaggcangggtnctgagngcctncntgagtccttcctccctcctttatanagtcgttcaaagggagccacatttnacttcttgctgcntggtcgcacnggntaaaatngcctgcttttcattgaaaccactaa

SEQ ID NO: 1779 - DNA, 323 bp, Homo sapiens
  misc_feature (1)...(323): n = A,T,C or G
aaacccactgctctcngtgttcaatgccgtgacccaggagangatgccaataatggagaacatgtctntcttggataaaaaggtgtctgacctgagaangcngntaactntganatgcgggctnccctgtgagngtctactgtctccggacaccaccgggactggagatgtatgacntgcaacaccctcaaggattaccagactgatatcggcacaacacttcgtctggatgtctgggatggatggaaggaatttctcatgggatgtcttcttgggcaaaaacctaaagnccaacactacttatcaaaagaaggaccagtcct

SEQ ID NO: 1780 - DNA, 188 bp, Homo sapiens
  misc_feature (1)...(188): n = A,T,C or G
aatgccttcgaaatctcttactgganatatanctaccagccgntnncannaagatnccaagaccgctgcaagntagcacttgcncanagtngnatcnactacttcatttagagttncttcagntaaattgctggggattttngacaaggcctttccttatgtggattattggagtggtgatgccccaa

SEQ ID NO: 1781 - DNA, 434 bp, Homo sapiens
  misc_feature (1)...(434): n = A,T,C or G
ggtgcggctctcacctcttatcaaagaaattcctttttgaagccaactgagatcattagagaaatccccataggttcagagaatatggtatccggctacaactgaatcncttacaacagacccagaaggctcaaggaacactgtggaagaggaggtggaaagactgtaagaactggaggaccagaacatctgctgtaaggctgtgtctcgtatatatgacaggaagtccacacccatataatcttaccaatatggctgcctaaagaagactggaactatgacaatagcctgnngactcgtccacggatggggaactctcacaaggccccacacctaaatggaaatttacagacagngatgactgctgacagagagagaganaatcantctttcccaaggatgaacctcatanncggntatctaataccaagtgg

SEQ ID NO: 1782 - DNA, 398 bp, Homo sapiens
  misc_feature (1)...(398): n = A,T,C or G
gactgagccttgcaggaccgatcccagccactggctgcctgttgacgtctggtaatcaaggacttcggaggaaggcatcaaggttgatgtgaggcaatactggaaaggcctagcgaggcctggtactcagggtcctcgattatgccttgccanaagaagtctgagggcggncatanatccagagcgtctggccacagggtaataggcatggcttgacatggtttgtgggtaaccagtgagcctcctcacttcaccaaggctgtccctagtcccttctaaactataaactggcattttcaaacactataaacatcttgtaagaaaaagactgtaaaagagaacaaatctttggggaaagcttcaataaaaatagaattctaaactgttaaaaaaaaaaa

SEQ ID NO: 1783 - DNA, 194 bp, Homo sapiens
  misc_feature (1)...(194): n = A,T,C or G
gggcagacggcgtcctctgagaaggantatgtcggaggncagatgctcttctgctcatnncactgggatccggngantgacctatttanatcagcanacttcggaaggagcgtggaacttctgntctnanttccctncaccccgcctttatccctnatttngagtttgagatcngtgcttgataagataagatt

SEQ ID NO: 1784 - DNA, 469 bp, Homo sapiens
  misc_feature (1)...(469): n = A,T,C or G
gactgagcgtttacagtctggatgtgcaggcctgccgagctgttcacccatctactggagggcatatgggctgtttccagtctggagcgaccgatacctggaagaaagccatcactgacagtcactggtgtgagcacggnccctttctntaagatgaaagctcagcgtgtgctgacatgcgtggcgtgatcagnggcgtatgattcccttttncagcaagcanactgttcatcagaggatgtgggatgtgtgaccttcagcatcagtacaggaaccatgcagtttatctgcactcttaccagcccaagtcagggaatggcctgtaggagtttgctttcttcttcagctacatcgtaggctcctggatcaaacgcaggccattaggctcggcagaagccacctttaacacaccaagcaatttcaccagctcttttatcattaaaaacgtatgtgtgtgcaaaaaaaaaaa

SEQ ID NO: 1785 - DNA, 485 bp, Homo sapiens
  misc_feature (1)...(485): n = A,T,C or G
gactgaggaggttaggcagngtgtgcggngcngcactttagtgactgaccgtntctccctagctgcnggctgactttnaaggtngcacgatgatacacnttgngcnagtatttaaaccttttcgcacatccaggttttaggccatccatcgttttgcctcacaagagaagtatgtatacatcaccttaagtaattcaaaattgttaccaaggacatggctcagaaagtagaatgctcaaagcaggagcaagcacgaatcactgggttccatccccagcaccccataaatgcagcatgacgatgtgtctgtaaccctagcattcaagaaatggaaaccggaagttgttcaggctcaccttccgcaaacctggcctacatgggacactgcctacccaacccccaagaaagaaaactatcactaaagtacttaattatcaggcgatatctccctatgagtatatcccttacatttttccaccatctgc

SEQ ID NO: 1786 - DNA, 440 bp, Homo sapiens
  misc_feature (1)...(440): n = A,T,C or G
tcgatcgaaccggagccctatttgtctgcgcnngaacggancaccgncancgctgcnncnataccaagcttgcacnacaccaggnntttgctgacatggacnngaagcgctangcgngcggtccttgagcccttccatccagnggaggcgaccgnttgaagaagagcttggttccnngccccnanntnccanancccttgcatatcttcgtgagttgctaggnngnttttntgtgacanggnaaanntatttgaagagcgtgaacanngccatgacantgngttggttaccataaaattacaccccagaagattttcctggaaaaagagaagaaaaccctatgctgaaattcttngagccattccatccagtgcgntgaagntttcaaaaaggcttggtncctggttcctctttcaccacaacctgaatattttctggag

SEQ ID NO: 1787 - DNA, 300 bp, Homo sapiens
  misc_feature (1)...(300): n = A,T,C or G
gcactgagactggggcaatgaagacttaggatggnccancccaaggaggacatgcgaactcacgaagcattccactttatcaaaactagcccaacatgcttacaggcagctatttgntttcagcattgccaagatgctatggaaattaaaagggcaaaattagaaggaaaacagngacctgagtatgngcaaagccggcttggcttagttttatggaacatgggnttntgaatccnattntgntnntaaagacaaaanataaactaancataggacaaaaaataaactaaacaaaaggac

SEQ ID NO: 1788 - DNA, 154 bp, Homo sapiens
  misc_feature (1)...(154): n = A,T,C or G
tcttctccatgaatctcatggganccttttcaatgnaggcgtggggagttgntggttcaagaggactggaggtactgattanaagagagttgccacaggaaaacacactggatcggcctccanagcccaacctcttcacagctcaaagaaagag

SEQ ID NO: 1789 - DNA, 189 bp, Homo sapiens
  misc_feature (1)...(189): n = A,T,C or G
caattggtgtctttcgactgctggctgagnttttatatggcccggngacattgcggnagagaccgccagngtcctatattcatcatgangcctccattanctgtattttggcgtttngccttttcttgntcaccatnctgatcatacgtggncatctccttagntacaggaaccgattccagatcacca

SEQ ID NO: 1790 - DNA, 176 bp, Homo sapiens
  misc_feature (1)...(176): n = A,T,C or G
aactgaaggcgtgtttgaattgcgctttgcgactctgaaggctgaaggaatggctgtttgatattggaaaaccagttggtgtgctcttncttgggaaaatnttggaaatggaaagnttaaatctctccttggantcaaaaccatctccatttaaanttataaagatgtcattgttt

SEQ ID NO: 1791 - DNA, 264 bp, Homo sapiens
  misc_feature (1)...(264): n = A,T,C or G
ccacaaacatgggagcaggnaatgaactttgncgagcnaagtcggcagtttgnnaaggactcngtttggntggntaaangaagcaccaaaccggacagaagggantgccagaanctctgcatggncacagaggatggatttgcnatcangggatngattgnctncctnatganactgatccntatccctattaataccanttctgngggtggctgantcctttttnatcacggaacgagtgaacagngagggggtgacaccgat

SEQ ID NO: 1792 - DNA, 330 bp, Homo sapiens
  misc_feature (1)...(330): n = A,T,C or G
ccttgaaactgactggattcattanaccccttnctaccagactangaaatataatagggngagatctttctcaaagncacnaagccaagcatgcaaagcaagactgggaaaccacaccagcctgtctggaagtagcaaaacccagcnnagctaactngaanagntntagaccaactnantcacttagaaaggatagtgcaaccatgtncagnatgcctgcancancactgngcaggntgctnagggtttcccggancttcatanacagtnaancatgctggnattgnnattggtggtatagctgcctttgattcattgactactcatatg

SEQ ID NO: 1793 - DNA, 216 bp, Homo sapiens
  misc_feature (1)...(216): n = A,T,C or G
attgcatggctctgcagcacactccgcatccccttcttaccgcaggaaacgatgcctcgctgatgcctcaccaaagaaagaaaggnctctcttgccttatttcagtggaatgagggctccagagcgcccagtggcattctaaactgtgtgtcaaggagtttattatgatgatagangccctctctnccaaggtcttagctatataaaacacaaagg

SEQ ID NO: 1794 - DNA, 262 bp, Homo sapiens
  misc_feature (1)...(262): n = A,T,C or G
caccccaagtttccagggggaaaccaccngccgccgcngccccggagggcacaggncttccacagggcaggcgcaccncagggggacccaaccgngngggacaagacccancacgggagacgagggaagaaaganccaaacacaggggacacanaccgganaancnngcanancagacanaaacaccgacgggagcaaacaanacagaccangaagcaccantntgaaaacgagcgcgacnggaaggggcgggggcaccaca

SEQ ID NO: 1795 - DNA, 420 bp, Homo sapiens
  misc_feature (1)...(420): n = A,T,C or G
tgaggtccttcccagcgacaccgcattcttttcgaagtgtttgatgaaaatcgtttggtaagntctgtcacactgcatgagtgtgtaggttgcattgatggtgaacttcangagagtggtggcagttgggtcaggaacctgagatctgagactgatctgagagacttctgagctactaatggggctatggtatttttctttctcctttcctggagttaaccctcccattccattctgttctgaaggacctgtcctgcttgttaagactgtaaagtctctctcaacgcctatgtgacagaaggtggggaagggaagccgtttttcctcgttttccatgccgtgtactctgaatctgcagttgtgtgtactgtgtgtctgctacagtgcaccacctaccgggtgtgtgtgtgtgtgtgtgtg

SEQ ID NO: 1796 - DNA, 187 bp, Homo sapiens
gattgaggatgctggatgtggcagagcacagccttcagcatgctgctggagcagtgagaccctgccccaagaaggaagaaagagacacccgaccgccgaaagttgtcctctgacttccacactggcgcacacctgcacatgcctccacctctgtctcataaataaatagtaattttaaaaaaaaaaa

SEQ ID NO: 1797 - DNA, 308 bp, Homo sapiens
  misc_feature (1)...(308): n = A,T,C or G
tcagggccaaccggaacgagngcagcggccanaggcgaaccacctgcgcccagcggnccnggagcacagaggaccaggagcccaggccacgaggcccgcctgcagnacaaccagacatgcagccaggagaggcgagagcccaangggncggcagaacggnggaaggngancggcccagccntgccagaggggnaactngggggagtctgnagagcagagccaggccagccgacaaccncaggcagcacggaanangcaggcacgnggcgagcggnccnganaggccaanagaagcaaggagagggccc

SEQ ID NO: 1798 - DNA, 282 bp, Homo sapiens
  misc_feature (1)...(282): n = A,T,C or G
gtaacctgtggcggtttttctccctcttcccagnagcnggaagcaaagcagcgttcgtcggctctataagtacaccaagacgaaccanacggccaagcctcctggccgcactctgccccttggaatgcaccggtagagatcacctgctngccaaccaagaggacctgtnnttcccaggctctgcagngccatggggcttgcatggaaatatcancggcatgaaaganaggtngcccaagcnngcnngcccctggccaagangtngtcatgctggaggagcca

SEQ ID NO: 1799 - DNA, 274 bp, Homo sapiens
gaggtgcctggtgtctgaagaggccagcaagggggctgtccaatcccatggaactggagtcctggatgttgtgagcccccatgtagttcagaaagatcagcctcaatagtcttgatccagtgtgctgcctctgcagcgtccaatactcaagaacgtttacaaatacacaatccgactttgaaacaagaatgcccttaaatggtaaaaataattaggtttagagaaatccacagagcaatgtaaagtgttaacatctgggacagaaacaaaaaaa

SEQ ID NO: 1800 - DNA, 306 bp, Homo sapiens
  misc_feature (1)...(306): n = A,T,C or G
attttggctggggatcgccccacgtacctnnaacatnncacctgaggccantcaaagactaanngggatggcgggcatccaacggcatctgctggtatcaaacgncttacccaggaactcagtatccagatcccgggcagctggacagagctcactcccaagaaggcccaggggtccctctgtgactgtntcagagaggccaggncctgctgtggagccagtgtgagccatgcatcccagcaggctgcaatcttgcccaccaaacaactggtttgattgaatgngacgcttttcaaacagtcgcta

SEQ ID NO: 1801 - DNA, 192 bp, Homo sapiens
  misc_feature (1)...(192): n = A,T,C or G
gggaagcgagaacagcngggccacnacaggcgngcaacagcngggggccaaccaaagagngncnaagngctgggaagagngggcacgnaggnagacnganagcgagnngggccanaagncaagcgaaagcggaggaanagaacaacaagaaacggcgggnggaggcccccgcaacaggaaggaggagaaggg

SEQ ID NO: 1802 - DNA, 248 bp, Homo sapiens
  misc_feature (1)...(248): n = A,T,C or G
ttcacaggacgaggtataatttatgggnaaatcttaanagtaaatcngtganaccagtaactgtnaccctnntgatccctgntnatactgacnatggccctctctcccaagtaacaaanagatntggnctggaatgcgagctcnnagntgcaactccagctccatgcanagcttgcctaaagncatgctccntgatatgacnaacgatggatcccngctctgnngngaatggcatttgtgctcaatga

SEQ ID NO: 1803 - DNA, 208 bp, Homo sapiens
  misc_feature (1)...(208): n = A,T,C or G
caccagaacctccctcaccttggctcancatcttctccccgcactcaccgcccctgcggcgacttctcccatctncaggactccgcacgggcctgcggagaggaggagcagttangggtggggaggaagtgcccgnggctgngcannnactcacagattnctgncccaggtgctggaaggagtctnctncttagtactcaatgaaccg

SEQ ID NO: 1804 - DNA, 284 bp, Homo sapiens
tctgagtgacttggtacatcttatacaaggtcgtacggtgggaaagacacatggacacccctgcctgtctgaagcccttagaggtggggtaagcatgactggggatagtaacaaaatgagatgggctcagtggatagacgcgattgccaacacaggcccgatgacctgagttcgagttctgaaactcacagtggaaggagagagctgactcatgacagccatcttgtgacctccatgtgcgtcgtatgccagccctcccagtagtgataataaataaaacaaaa

SEQ ID NO: 1805 - DNA, 153 bp, Homo sapiens
  misc_feature (1)...(153): n = A,T,C or G
tgacgtgctgtgcctgagcaccgaggcactgntccancnttttntaggggncccagnaggacnaaagggtttanagcgtggctgaggctgatggtggggcggaccacnctgctgccgaaaatnactantgaaccccatcaataatgtcattga

SEQ ID NO: 1806 - DNA, 200 bp, Homo sapiens
  misc_feature (1)...(200): n = A,T,C or G
tgtcttatgtcccgtnattatanaaggtagaatttgaanangggaagcacnatctacaanacgaggaccgggaagaaagtgcgnngtgcagnggnttagttgcgnntgnacagccgacatgntggtggntgttgatgaggtatatgcctgggagacntcctgcgcatttgtttggcattgactgggcaagaggagataca

SEQ ID NO: 1807 - DNA, 169 bp, Homo sapiens
  misc_feature (1)...(169): n = A,T,C or G
aagagctggtccagaagtgtgctactgtaatctcgctgaagggaggtcaagacaggaagatcaggaaatgtgtcctgtggcatgcatgtgcacgcacacacaaggatgtactaactataattttaaaaatctgaataaatancaatatgaagataagctttaaaaaaaa

SEQ ID NO: 1808 - DNA, 400 bp, Homo sapiens
  misc_feature (1)...(400): n = A,T,C or G
gtacactggcctgagttctggggagctacctcagctctggttttctctccatccatgggcngtggggcccaaggccatgatacctcacttttatggngcggataacacctttgtcctaggaactttctggntccacccactccttccagnacctctccttgcttttctnggggccntgaatggactccattgagcaacgctgcatgctggnagggatcacgtcacactttatacctgctcctgctattnactnctcagggcgangtntatataancacagactcaaccggnaactcccanccattcgtggacccatctcttaggcttncacaggaaccccnganggtangagggaaggctngccattctgtnataagggcancgcaggttaaaggaacac

SEQ ID NO: 1809 - DNA, 180 bp, Homo sapiens
  misc_feature (1)...(180): n = A,T,C or G
tgaccaggctgggagtgtgcgtgatctgngatcagncangagtggactangcgaaagcgtnttnggataccttgncctgctgagntttggtaanctgcnaacttgccctntgatgnncncaggacagnggcttgtctacagggggnagaagccggtgacggnagcaggagagcaagtaca

SEQ ID NO: 1810 - DNA, 155 bp, Homo sapiens
  misc_feature (1)...(155): n = A,T,C or G
attttggggaacccagcagccagcattttgggnggcanaacccnctggnggagcnggagctacaagcaaccgcgntaactacacngnanaaaacncttcaaaagcagtaacaagtgatcntccacccctctgcctcnnctctgcaagaacagcga

SEQ ID NO: 1811 - DNA, 201 bp, Homo sapiens
  misc_feature (1)...(201): n = A,T,C or G
ccgcaaacaggaaaagccctgggaacagcggtctntggaggccactgntaagctgcagctctcccctncctgttcctcgtcccccgnnagcagcantgaggaagaagacagnaggancagctcttttgctccaggcctcagccctccccggggaccagaagcttcggactctccctgtagcanaagccctggaggaggaga

SEQ ID NO: 1812 - DNA, 158 bp, Homo sapiens
  misc_feature (1)...(158): n = A,T,C or G
ggcctgctcttcagaaggtnctgaattcaaatcccagcagccacatggnggcatnacaaccatccgcaaggagatcagacttgcctgttctggagtgtgtgaaganngctacagtgnaccttacatataatangaaataaatctttgaaaaaaaaaaa

SEQ ID NO: 1813 - DNA, 265 bp, Homo sapiens
  misc_feature (1)...(265): n = A,T,C or G
gactgagcccctctctaaggaaacctttaaggaagacttgtaacaagagaccttgggaagcagctggatactttggcgaaggtccctctgcccggaggtgaacancttgtnatgggatntgccaaangggcacaggctcagctcnngagtgatggagntngnangncctganaggccaccagcntacaanacacttgataactgnncntangaacgtattagangtnnttnacttttgtatcanatacgaattatctgcttgctg

SEQ ID NO: 1814 - DNA, 166 bp, Homo sapiens
  misc_feature (1)...(166): n = A,T,C or G
tctgaggtgcccaccgagnacggttcgncacaagcctcaaaatgccaatcttgtctgcgtccccagtgcacatccaggacctctccccggccagctgtgcataacagcaagacagcctctgaccaaaaaaggagtccttaagaactatgtcacaaatgaaaaaaaa

SEQ ID NO: 1815 - DNA, 188 bp, Homo sapiens
tgagacaggatctctcctcagccttggctctcctggagctcactgtatagaaggagctgacaagagtccacttgcctattgtgtctcaagggctgggattaaagcgccacttctgccagtgtcacacctgttgagaaaataccttccctgtgcaaaatagacatgctatatggttgacaaaaaaaaaa

SEQ ID NO: 1816 - DNA, 162 bp, Homo sapiens
  misc_feature (1)...(162): n = A,T,C or G
cacataagtgttgtacaccagcanggaagttctgtntngcacgtacctcannagnggggaccctganggcnngaagattaccgcaaattcaacaacccgtctngaagaantacatgancaatagtaggcaacttaaaatggctgttctgtgggtttatgctg

SEQ ID NO: 1817 - DNA, 185 bp, Homo sapiens
  misc_feature (1)...(185): n = A,T,C or G
gctagcaccgatatttagaatcatttagttaccgtatctagactacgtatagggtagggacatcnatgcnctgctaaantnnangnnctactaaantctttcagtgcactgtnttatncnaagngagngtacntgatgctctgnccctgagagttggccctattataactggttcagatgccctg

SEQ ID NO: 1818 - DNA, 228 bp, Homo sapiens
  misc_feature (1)...(228): n = A,T,C or G
tggacggagtgcatactcattangnnaggcagggctnctgcccctgctgcaccgagcccnccacgcncaaggngacccngccctcaggatgagccnatgnaaagttaacataagcangcgctgcaggagtncatgcaagangtgcacgccagggtccagccgcgggncctncaggacaagccngacaggccacgtgacttcaatnatacanngctactgcccgagcgg

SEQ ID NO: 1819 - DNA, 450 bp, Homo sapiens
  misc_feature (1)...(450): n = A,T,C or G
cagatcaccccagaagntctgtagctctctgtatgagagagcacagagactggcagaggggcaggagctgcgggagcccaccccagtccagagaaggaattggagcctacaccatgagtggaaaggcaaggaaagngggctagcctttggtgatggaggagccaggacaaactccaacacagccttaggagactggatcactgcctgtgtggatccctgatggcgcggagcccctgcagcaagagcggcaagccaaaaaccagggcaggaggcttggtgaattcaggacagaagctgttttttcctcangtcctcctgaatccccgcccccctggttcctaggctataaatagatggcaggtggggggaggggacagaaggcgaaggtcgatgaactttggnttgaatttgggtcaagttttnaaatnaacagggtcaagccttataaca

SEQ ID NO: 1820 - DNA, 281 bp, Homo sapiens
  misc_feature (1)...(281): n = A,T,C or G
acagcaaattattgtggatgaactttctaatctaaagaagaatcggagagtatacaagcagcaacagaacagcaacatattctttcttgaagatcgaacaaaaatcttttctgaaagcaaaaatacattagacgaactaaaaaaagaataccaagcattagaaacctccgagacaaccaaagtcaagacacagtcaacctgacttcacataaccatgtgtggcatttgctgttctgtaagcttctntattgaacacttcagtaaagagttaaaagaggaaa

SEQ ID NO: 1821 - DNA, 330 bp, Homo sapiens
  misc_feature (1)...(330): n = A,T,C or G
gtaaacacatgctagnatntgccagtcaaccaaacttccaaactgctaaacctctgaagaatgaaccatgactggagctnaccgcatttcacagctgttcaggctgagcaactatcactaatgcaagtgcacagccaatgccactcacacacntgaaagcacgtgttctctacatctgaaccttccacaatagcaacttgtgttgaaaactccagtaaaattagccagcctgctgatacgttgcgatcttctgattatggagcacagacattttgtaactatacaatttataagcaactaataaactttgaaatgttagtgaaaaaaaaa

SEQ ID NO: 1822 - DNA, 152 bp, Homo sapiens
acggaactgcagcagctctggaaagaagtgacaagtgcccacactgcagaggaaaccacaagcagcaaccacagcagcctagacctgaccagcacatgtgtctcgtcctcgtcactctgctcactggggcttgagctcgagtcctcagccca

SEQ ID NO: 1823 - DNA, 209 bp, Homo sapiens
  misc_feature (1)...(209): n = A,T,C or G
ctcacccaacacatttnctgtgactttaacaactaccaactgctacagtgagacatctacattgaggctgctatcctcaacactcaagaagaacaactctggagaaaaggaaccagcagacaccttagggcttgaagtcacatgtcacatttgtgtgctatggtttttatcttcagagggtatgtggtgtgtgtgtgtgtgtgtgtgtg

SEQ ID NO: 1824 - DNA, 155 bp, Homo sapiens
gtctgaggatctcactatgaagtcctgactggcttggaactccccatatagaccatgtggatctagaactcacttgtagaaatccatctgcctttgcctcccaagtgtgaaccattatgccctgactaagacttatttatttttaaaaaaaaaaa

SEQ ID NO: 1825 - DNA, 204 bp, Homo sapiens
  misc_feature (1)...(204): n = A,T,C or G
ttgagaatgccataaagacatcagaagagtcatggattgaacagcanttgctggaagataaacttgtcatcccttcccagcaatgatgacaggaaaatggaagtggcaagttttccttctagtatccgaagaatctgagccttcaatgttaaaatttttcttaattaaaatgtgcgtttatttcacaaaatcaacaaaaaaaaa

SEQ ID NO: 1826 - DNA, 176 bp, Homo sapiens
  misc_feature (1)...(176): n = A,T,C or G
ctgaggtggggtctttnactgaagcaaacatcccatgaaggaagcatgaatgagtggagacacatcgcattcatggatcagaagatgggagtgatggagatgtcagagtgtaatatgtatcaggtcacccaacgtttattgcagtaaagacgcaggaggcagaaactgaggtaaaa

SEQ ID NO: 1827 - DNA, 224 bp, Homo sapiens
  misc_feature (1)...(224): n = A,T,C or G
ctgtctctgttgcctgcggactggagttacgggcatgtgctactggcctattaaaggactcttgggtgggaaaattggtgttttcttgacaaggcaggctctgtgttggtacaacacggagaccatggtagaatttggggtcctaagcctggctacttaagtcatgaccagtggnctttccatcagaaaacaaagttcattagacatncttctctcaaataaaa

SEQ ID NO: 1828 - DNA, 279 bp, Homo sapiens
  misc_feature (1)...(279): n = A,T,C or G
ggtttccaggcaccagctgaacagcacacangnctagcctccngatgcggtactttgttgagacaggggcnacncagagcnaccttgaagcaccantgacntngccagaccgnctggcctngccagggaccngtagggnaccatgtacaggtgcagnctcnctnanatccgcacctgtgtgccttgtatggggggcagaacngngagnggccagcacntataccnactanagcatctctccagcncctagaggatggcngcggtgaggatgattgaagg

SEQ ID NO: 1829 - DNA, 244 bp, Homo sapiens
  misc_feature (1)...(244): n = A,T,C or G
ccagcgggagtacaggaagcagtctgaannggaccgcgccaccctacnctctcagangcgcgnccatggagnctgagccggaggaccagcgtngtgcagcaccggggctgggcccagcgnggntgaggaagnggcctaccctgangcagcagctggctgccctagacaagcacttacgtagccagcngtcanttcatggangancaagctgccagagcgtgancatgagcgggaagagtcccag

SEQ ID NO: 1830 - DNA, 513 bp, Homo sapiens
  misc_feature (1)...(513): n = A,T,C or G
gactgaggcagagaccacctaataccagcctgctgcgggtgcaactggaatgcagtttacataataaagtgtgtcagcaattgaaggnatgcctctctgggatctgatgatgcagctacacattggagatgaacatcattgtagcagtggaaaactcctccaagcaacctgaagagaacactcaagccctgctagatcacctctctattgtctatgtagctacntgatgagtctgacacctcagatgaatctgcagtaaatatgtatgtactgcattcaggaaacagccttatttggatacaggatatacatcatttctcacagaaaaatgtcctgtctctgcagtttgaaccagtactgctctctacttccacgacaaacttcacaaaaatcgcctcgtttacttgcaaagcaggtaccttgtgtgacagtggaatcatgggcctgaggaaaagaaaagctagcccagcaatgcaagcctgcctgtcctctcctgtggtgcatgggtatttc

SEQ ID NO: 1831 - DNA, 224 bp, Homo sapiens
gagtggcttttatggcctcccactgaaaatcaagaaagaaccccatgtgcgtgctggaatatgaagtctgagatgtaccccccaacaccccacgctggcgatacgtgagagttgttgaaagtcagcaagccgagcgcgcctgatgctctgtatcagtctctacttttatttttatgagtttgctctgtcaatggacaataaaccatattatcaaagaaaaaaaa

SEQ ID NO: 1832 - DNA, 432 bp, Homo sapiens
  misc_feature (1)...(432): n = A,T,C or G
ggctgaagagcattctaaggataaagggtcaactgcaaggaaggaagtgcctactgaaaagttagctgcccgaggtgggcaagagcctttactacttggtgttctgcatgacccagatgcatctcccgagggtaacttgggaagacggctcccatatggtaaccaagcgataacctacagacttgaatacntgccatccatcgcagattttagactcaacgaaatgttgcaagggggggggcaatcatggcaagaaaatccggctgttttanactaaagactattgtatcctcaactcanatccagtctcatcaaatgtaactgctttctactgcatttcagcacaacagtgttcttaactgacctaggcaaattaattctttactatcacagccaataaaagaacttttttcctaccctgaaaaaaaaaaa

SEQ ID NO: 1833 - DNA, 155 bp, Homo sapiens
  misc_feature (1)...(155): n = A,T,C or G
ggagctgtcccggtagccccctgtggcgtnctggctgtgtgccatgttgcactgttttgggagttacatcctggccnacctgcttcttggggagcccatcattgactacttcagcancagctccagtatcctgctggcctctggagtgcggctct

SEQ ID NO: 1834 - DNA, 471 bp, Homo sapiens
  misc_feature (1)...(471): n = A,T,C or G
gaaaggcaacagtaactgngtcccgaggaagtgtcttctttggaggaatatatccctactcggcatacaagtgttactttgcttaagtgcacttgcacagtttttatggcagaattcaatttacttgattgttngcttcctgtcatcatgggaggaaagaacttgagtaacgtcannaatgccacaaacttccagtcacttcgggctttgccatccattcagatattggtggataaaattaattnnggaacattctgtcccaatgtatgctnaacagttggtccatgtantcagcagccttaatcaaccttctgataatcttcttcattattgttatgtncantgntaccttaangngntnggttnncaggccggactgacttgcntggancatantggctnttactgctttaccntgcaccaattatccccntctttccagcaccagncccatttatggagaaagcttct

SEQ ID NO: 1835 - DNA, 219 bp, Homo sapiens
  misc_feature (1)...(219): n = A,T,C or G
ccttcccaacgtgcaaagccaaggcancagaccccaggccctcttctggagatggaagcttgttgaaaccccagactgtcnccacagcttgcccggctgaccccaaggaacactgacagcaaccttacnctgaggtcactgctagcgctgacccgaagacncagncacntgccacctcttccttctgttgtntactgcaagcgccgacttccaaaaaga

SEQ ID NO: 1836 - DNA, 170 bp, Homo sapiens
  misc_feature (1)...(170): n = A,T,C or G
tggagtcctggcattncctntggcatttttntacatgttggggttttnatnccaagtcttanggttgcangttaaatgcnttgnctattcanacatgttatgccctgtctactgcttacagttcaagaatattntctctacattactagaacgacattcaaagtggacta

SEQ ID NO: 1837 - DNA, 199 bp, Homo sapiens
  misc_feature (1)...(199): n = A,T,C or G
ctgagacagcagaagaggatcacaaggnacactggcaaagctacagtcaaaatgtagaccacccaaagccatggacgctcttcagctgcctccagcatctgcagcactacacctggctgaaataccaaacaacagtaattcagagaactggtttatgacaccaaatacagactcgactgattgcttcataaaaaaaaaa

SEQ ID NO: 1838 - DNA, 238 bp, Homo sapiens
gactgagatataccctcaaagataactctaaaaagcatcttgaagtatgggatccttctcctgaagaaattattacaagtgaaataaacaacttaagtcctttatctgtaaaatctctacctaatgagaatttccagtcattgtataacaaggagcctgcctgtgaacatatgtaatgtaatatctcctgagaagatttatgttcagtggttattaacagaaaacttacttaataggt

SEQ ID NO: 1839 - DNA, 177 bp, Homo sapiens
  misc_feature (1)...(177): n = A,T,C or G
gggaaatgctgacaatgccactttctgcctgttaccaagaaaacaaaccaagtgcgcatttgcacagaatgatttcaaggactttaaagagccaggcattctttcaacaaatgagttgntgntgtttcaagtatccttaaacttaaaactatgcggttttttggttaaaaaaaaaaa

SEQ ID NO: 1840 - DNA, 182 bp, Homo sapiens
  misc_feature (1)...(182): n = A,T,C or G
acggagaaagtgtgtccctggatgtgggttctgagntttcatagcatctnnntacctctgattcacctagattcttgnttgcggngaagatgagatctctcaacttcctgtccctgttgctttctgccatgcttaccatttgactatggagcngggaggcaaaanaaagcctctcttcccta

SEQ ID NO: 1841 - DNA, 476 bp, Homo sapiens
gaggcctctcggtctaaactgcaggagctgaacagagttgagtctgaaagtcttttgactctgaccacccagcttgtaaaagaaaaactccccgcctgtgaggccgaggacctggccacctacgagcagaaactccgtgagtggcacctggagcgggtgcagttgatccagagggagcaggaacagagggagaaggccaagcaagagtaccaggcgctgagtgcggcagagaaagcagcctgaagttctgtgagccacctcagtgttcagccaggacagcatggggctccgctgctactgtccagttcttttcttacaggaagctgtgcatagcctgaaaaccaggatggctctatgccaagacactgtctgcccatctagatgtcaagggcctgaactaagtgacaaacggttgggctgaagcccccacacagtggagtcctgggtgcagactgggaatatcgggtgagcgtgat

SEQ ID NO: 1842 - DNA, 158 bp, Homo sapiens
  misc_feature (1)...(158): n = A,T,C or G
gggaccaacgggaaaggaaagnaacattttntgttttggggagcacactaggntagaaagggggtttacagngncaccaagagaaggggagttcacccacctnccgtcacactggacctcttcaatattctattttaatgattgtcaaatcattatgt

SEQ ID NO: 1843 - DNA, 421 bp, Homo sapiens
  misc_feature (1)...(421): n = A,T,C or G
tgaagttcgcgctggcttatntgctcggtcccccacaagcaaggctgatggggaggggcctccaaatgcctatgnaaaggccantctncggatttgtataaccagtgcagcaagggcgagtagaagttcacaattccagccagagaagcgctctcagcacacggaaggcaaggggagggcgcggatcacactgtgcagcctcagggtgcctggcngggaagaaaccttctacagcaaagacttcctcctgtcccactttccccgccaaacactcaggaaaagagtgggtggaggagggacttctggcgagtcctctagaaagaatgcaccttcataatctagaaacccagcggaccgnccagcancattnctgccctatgctatcctgcctcaattgtcatccagctaaataaaatcgggg

SEQ ID NO: 1844 - DNA, 334 bp, Homo sapiens
  misc_feature (1)...(334): n = A,T,C or G
atcctcctggccagtcagaagaannntntgcatttttggntnaagntgtgggantacanaaataaactctcatnacctttacangnnaacaagaagncacatnaagcagnnggangagactgacggctgcctccggaagcnnagaaagagnaatcnancnntcagctctgccattgactngctgactcaggccaggaccgntgctncgggatgnggacaccctcctagacacacccaaagatcaggcctggcaatgtnccatgagcctangacgtctcaccatcaggacctggtattgtgggatggccgacaccctcctagacacacccaaaga

SEQ ID NO: 1845 - DNA, 158 bp, Homo sapiens
  misc_feature (1)...(158): n = A,T,C or G
ctgagactgacatcctnttctatgagcaaggaaanatccttgctgnncgaacngnngngagcgctgnncctgncagcatgcctatggaacacntttatgnnctctgaccccctggaactggaagcctaattaaacctttttttttataataaaaaaaa

SEQ ID NO: 1846 - DNA, 331 bp, Homo sapiens
  misc_feature (1)...(331): n = A,T,C or G
ccgccttctggtgagacccagtcccaggacaaggcgaactacctgccccagcagcaaccctcaccacctgactacctactacgcgcatgccccaggctacagtcactttaggaacctcgccaccaccgaggaggagtttcaaccttggaaactggcagctgcagngctngagtcccanacgatggcccctcntgatgcttttcggatgacggctcccttgttgaacccggcactgnctgtncagagtgagccgctctacaatctgccctgnnacaaattgtcaccatggaaccgaattcctcanttcactcccgaagtaccacgatttcta

SEQ ID NO: 1847 - DNA, 325 bp, Homo sapiens
  misc_feature (1)...(325): n = A,T,C or G
atgcccctacttgttngggggtcnanaccttcctgaaacgacgatggccaaaagtacaaanttnaaaacagaaagccagacttgtctgaatgcacacagaacagaagaacatggatctagtacattaaacaccacgatccactagaattcatgctaataatacaatgatgacccactacccgcctattataatattttattatattaagagattaaaagntttttntgatangantatcttccgcaagtgaagggcgatttgatataantcganctccactcttantgaaaactcttaataaaatgaacatgaaacttcaaaaaa

SEQ ID NO: 1848 - DNA, 226 bp, Homo sapiens
  misc_feature (1)...(226): n = A,T,C or G
aaagacctcgaggcccaccagngatagagaanctagaccataacagcacgacngagagccanggacaatcagaaagcaagccagccgncngcaagcaggacngaagccgaannccngctgctgcatctgcacnggngcaggagaanaccaggggagcccgcaaatgtnncgacaaccccgaggnagccaaaancctgcattaaangcgcaagccgaaaaaaaaaaa

SEQ ID NO: 1849 - DNA, 205 bp, Homo sapiens
  misc_feature (1)...(205): n = A,T,C or G
gccccgagggaggcacaanggnggccaggagagcnggggacngaacnacccaaacagaagggagaaganncggagngggaggacagacanaaacngatacgtaagaagcggcgggggaggaacagcagggnnaacgaccaggagcagagagagggacacgggaagccagagaggcanggacacaaatacccaggggccccaagcg

SEQ ID NO: 1850 - DNA, 377 bp, Homo sapiens
  misc_feature (1)...(377): n = A,T,C or G
ccgaggagggagcgcngagncccagggcngcagacaggaggccaagacccccccaaaccccgggaccgcaagggcagncacccgagaagaancaagcccacagccccaaanagcaaccacccancggaccaaagcgaaggancgagncgcacggangagaacccagacagaccggangagacngacatnaangnggaggancgcgaaaccccggangaagcagacccccnggaagacaccaaccaagaagancccacggccaacanaagccnggggcaangagacagagcccaggccagaaaacacngcngaagaggancagagaagacaaccgggaagaggagganggnggccancgggaagcaggagcgaccggc

SEQ ID NO: 1851 - DNA, 251 bp, Homo sapiens
  misc_feature (1)...(251): n = A,T,C or G
gcaacggaattctccggattcagaacaactcgacggactggctcctgtctctcctgcatcagttctcttgagagaggatgacttcagggntgtgcagcaccttggnatcacntgtcctgcggcagcgtgttgaagctgagatgtancatggtccgnttagntggggaacctcacaaccttnncgtncncacgctaacnccttctcccgagaactctgngngnatacttaggaaatgtgaatcttatagctg

SEQ ID NO: 1852 - DNA, 182 bp, Homo sapiens
  misc_feature (1)...(182): n = A,T,C or G
gcccatatcctaggggggcctgtgatcagccttcgggcaggggacccnctcaacctcacctgccacgcagacaatgccaagcctgcggcttccatcatctggctacgtaaaggagaggncatnaatggagccacctacgtccaagctcatctggaatccacaacctatgcttcccttttttt

SEQ ID NO: 1853 - DNA, 165 bp, Homo sapiens
  misc_feature (1)...(165): n = A,T,C or G
ggctttgatgatgatgaantgaaacatggtggaccttgtacatcctcgtcccaggnggncnttggncttacagcgaaagccaagcatattaaaatactgaagattaaaaaaagagtacaaaccttcaaagggaaaagccaggacatttagctgcatcaacagaac

SEQ ID NO: 1854 - DNA, 318 bp, Homo sapiens
  misc_feature (1)...(318): n = A,T,C or G
gactgagctccttgcgtcgacatcaaggacatcccatcacgaatggaataaagtaaggtgaagacccagctggaaaattactgaaataattcaggtgtgactgtgatgtgagaagctgcttaagttcctgccttgnctccccctgaagcgatgaggtgaaacctggaaatgccaacatgagctgtttgctgggaagctttgggagaccacgctgtatacaaccaagatggaaccatgaaaactcacagctccatgccatctgcctttttcatnaggttaaaactttaaatggccaaaagtaaactttaaaaaaaaaaa

SEQ ID NO: 1855 - DNA, 267 bp, Homo sapiens
  misc_feature (1)...(267): n = A,T,C or G
aacctgtatgagctgagtgaggaccatcaccttgaaagccgagcagtagncccataattcacctcacagcacagtaggtcatctcctaatgcnatggcttcgcttcattccctcaagtgaaangttggtcctagggtctcctgctgtggtgactgccagccattacctgaaggttgtctttctagctaatattggtaggctgagacactgcaganggaatgacttgcantgcctaaatgagttccaaccagaagaaagaaaaagaaa

SEQ ID NO: 1856 - DNA, 469 bp, Homo sapiens
  misc_feature (1)...(469): n = A,T,C or G
gaaggcttggaaagctggctcacaggnactaaagtctctacagctctggggacagngaaganacgtgggaagntnnctgactatcgtttgaagtgttncgaagcccggaaggtcccgatgnggntctgggacaggtgggcangaatncaggacanaacttcaccaagtgggaacanaagatgaacaacggagccccccagctcaaaatatcaggcagctgtccccaggcaggagcaagccatttccctgccaatgagctcatttcctgcctgcacaatccctccactgaccctgtggatagacccactcctccacttccggactgccaagggaggtgaggaacagaaaaaactctggaccccgctggggccttccaccacatggagaaaaccagttacctagtccacagcaggagaccaagaagggttgtaggctgaaatagaacagcttatatccggaaaaaaaaaaa

SEQ ID NO: 1857 - DNA, 207 bp, Homo sapiens
gactgagaccgaatgggaggaacccactctgtcatgagagctgtcccagaggagtgcattggctgagagctccacacttgtgaagtcaccttgtgaagtcaccaccaggaggtgagcagcaacagctcacaagctctttcccagggtttctgctggtgtgtgctgagttcccgatgcaatacaaaaacaaaccaagccaaccccaaa

SEQ ID NO: 1858 - DNA, 192 bp, Homo sapiens
  misc_feature (1)...(192): n = A,T,C or G
ggtttaggggggaacncangcaccncgggaacaaaacccagcacaggatgtttgggggggggaaaacacccgacaaaccacaacgnaagagcgaggaaacncaggaaggacnnaaaagggcccgcgacacgancaaagnaaacaacaaagnngagangaaccgnncacaccggacgaaggggagggaggagg

SEQ ID NO: 1859 - DNA, 453 bp, Homo sapiens
  misc_feature (1)...(453): n = A,T,C or G
actgaggatacaggtctgcgtgaacatacacctgcttgtacaagcacgtgctaacatggactgcgtgtgtcacagacagccagctcagagaggttgagcaactcggccaagaggaacaggagtaaaaccaggaagtaactcggtgcaggggcgtggtgttcctacaactaagtgctgggggactgcgtgtgcatgcngtgcagcngtgcngtgagcgccacgcccatctgcctgaagtcctcatcgccaagtttttcctgcttaacgtccaataacacacccacgtttcctggcacacgatgatgtccctaaggggatcagcagcccaggacaagaccaaagctcgatgacctgggacagctatccttgctgactggatggagtctcctctcagccggctagagttttcccctcccccacccataattccagactgcaagccaaaaaaaaaaa

SEQ ID NO: 1860 - DNA, 368 bp, Homo sapiens
  misc_feature (1)...(368): n = A,T,C or G
tgcccgtgtaactcaaaggacaaactagctggctaaactcattcttggtactggtgagcgagggtatctgggcagttngggcaacacctgggctatgnttagttnanaaattcagccttngtactgagtatcttatggtggctattattttnaggtgttggattattctanaggttggatannagcctangtggcctnctggcctaggaggaggatngaggncactntctngcatgctgcctttaagaangtnnggaatccgnngcctggccgagacaggctcagcngggnaanagcaccccnantgcntttccaaangtnctgnagntcataanccagcatccagatgtntggcatcacaaccatcc

SEQ ID NO: 1861 - DNA, 209 bp, Homo sapiens
  misc_feature (1)...(209): n = A,T,C or G
ttggggaactctcagaggacggacaggnancatcggcatggntccatatntgtactgcctanantctgctnaattcctagctgcgncacccgggggatcgaagttcctatncggangttcctattntctnnaaaagtanaggaaccttctcgacctgcaggcatgcngagctgggggggtcgacgtcgagaaggagtgaaaaaaaaaaa

SEQ ID NO: 1862 - DNA, 447 bp, Homo sapiens
  misc_feature (1)...(447): n = A,T,C or G
ttgccagtataggaggtgagtgtgtgcatcctgagtgactatcacaagctgcagcagcaggctatgtgggcacatgcctgtaatcccagcactgggctggaaagagaggcatcccaagccatcaatggcaacagaccctgtctgtgtgtagatgtgtgcacatgcatgtgccttcactagtgtctttccttaggaaccaccatccaccttgttttctgagacaggatctctcattgggttggttcccatcaagttaagttagtttggtggccagcaagctccagggattccagtctctgctttccagcactgagatgacaaacatacagcactaggcttttggtttttttaaatncgtattctgagattgaattcaggtctttacgcttacagtgcaaacatttttactaactaatccatcttcccagctccagacccttgacagga

SEQ ID NO: 1863 - DNA, 310 bp, Homo sapiens
  misc_feature (1)...(310): n = A,T,C or G
cccatgctgcggagggatggccaaccccaccnaagagaaagcaaccacagaagccgnggtctgganacgaancctgccccttcacctgaaggagtctnatcntgnanaatggggacgatactgtttggataangctgatggacatttgacaacgtgccagcttactcacactgncacgtggntctccatntcantcacaagcagaccttgttttttaaagggagactttgatntacgggtggaaatgganaaacaaggggagcanncgatntcacaagtgcctccccgcagangacagattaagttacca

SEQ ID NO: 1864 - DNA, 200 bp, Homo sapiens
actgagttcaaatgcctgatgccgaaatgatctgcctaggaccatgggatcaagagccatgggctgagccttctgaagtcgtgaaccaaaatgaatcctcctggggaggggaaaacatcctcccattgctgtttctgcctggtatttaggtctcagaaagaaataaagtaactattacaccacacccccaaaaaaaaaaa

SEQ ID NO: 1865 - DNA, 331 bp, Homo sapiens
  misc_feature (1)...(331): n = A,T,C or G
actacccatacaccccatctgcttctgatgaaagatgagccagatccagagccngacaccaggnccaccttcctggatcctnttncagccatgaagcagatgangcnaaggtccagggcatggnaccctgtnagatgcactcaagcctggagctagctctgccctttgtagaacacanaaatgattctggttctctgagccccagttttacaatctgttaagtccttggtgatggggtgccctgggacgtctcccctccgagcctgatctaacaacctgacttgtagtcacacgtaccaccacacacagctgttattatttttaatattgc

SEQ ID NO: 1866 - DNA, 267 bp, Homo sapiens
  misc_feature (1)...(267): n = A,T,C or G
atgccagtgccatgaccctcatcgacgcctcagggcgtcaacttgtccttactgtgaggagggtaacagatgaagggtctgtgagatccccatcccccggagagctacaggtgctatcacccttatctccactgagtcctgagcccccaggtgctcctgtttcccaggctcttnagcccacaagccttcgttcaccccctgacagcgaagcttactatggagagacagatagtgatgtngatggccctgccacacaagagaagccac

SEQ ID NO: 1867 - DNA, 179 bp, Homo sapiens
  misc_feature (1)...(179): n = A,T,C or G
aaccaaacctaagaaaagngttttcccaggcaaaaancccatgggttccntncgggaaagggtaaanttgggaactttccccnngggggnaaccccacccaatttatttttttttcnntncccagggaaaggggttccggccttttatttanccccaagggtgggggaggttattggcc

SEQ ID NO: 1868 - DNA, 282 bp, Homo sapiens
gactgagacctgattttagggtgtgtgtgtgtgaactcatcccaaccagtcccaaactgaaattccaattccacaagaagacaacgttcagctgtcaagagctgaagccacatgtgacttctggtctgaaaatcagtcagacagcagatgggccaagtgtttgtggaatgtgacaaggctcgaggcctgagccaagccccttcgccttaattccaggcttagctcagagaagagcagtttggaatgcttttcttttaaagggacaacgttaaaataaaaaaa

SEQ ID NO: 1869 - DNA, 229 bp, Homo sapiens
gactgagaccccggaaactgccatccctcactgccgaatcctgatagacgtctctgtccctgggtgccactgcccttgagggagtgacatctttcctctgacagtgtctctgcagtgggggctgatctcagcactgtcttttgctcacggtcaactcacttctcatctctttgtttttttggaactttatgccttttgttgttgttgttataaaatctgaataaccttg

SEQ ID NO: 1870 - DNA, 172 bp, Homo sapiens
  misc_feature (1)...(172): n = A,T,C or G
tcacaatttccattcctggtacagtcccctgagtcatgttcagcaaatacattntaactgtccttgtgtctgtntgaacagantangcccttgctgnctccttccctcntcagagaggccatgcatttagtatgatacgnatatnntttttntttcccccctcctgattgct

SEQ ID NO: 1871 - DNA, 153 bp, Homo sapiens
  misc_feature (1)...(153): n = A,T,C or G
gatggattgcacgcangttctncgntcgnttgggnggagaggctattcgnntntgantgggcacagcagacgatnggctagcttgccaaacctacaggtggggtctttcaatacaaaaactaccaataaaaaataccaataatgaaaaaaaaa

SEQ ID NO: 1872 - DNA, 150 bp, Homo sapiens
tgcccggcaaggataacgacttacagcacagtgttgctgtccccatccacccctgttttctgacaacaagggagcgcgggagaccggagcgctgaacccaaatccctcagcagttgcacttcattaagtcaaaatgtgacaagaagctta

SEQ ID NO: 1873 - DNA, 350 bp, Homo sapiens
  misc_feature (1)...(350): n = A,T,C or G
gactgagtggccatgctgaaaaatcatattcaacatccatcaatctatcagttgttggagaaggcataaatatgccatttggactgctcttaggaacagagagaaaccagtgaccagaaaagaagccagggaagtgccagtgtcctgactgagagcatatggaanagatatganaatcccccaggaaacttgnggnccatctacaatacattgatacctgcctcaaacaaggtggaagatgagangtgtcattcaaggctgatcttanactccattcatgcaccacctggtgtggacattgtacacacatacacacaccacacacaaacagatacatacacaaaaaaaaa

SEQ ID NO: 1874 - DNA, 241 bp, Homo sapiens
  misc_feature (1)...(241): n = A,T,C or G
aaaagttcagagtccgagccaccctggnttccttgaggtcaaagggagccgggaacagcctcctgccctttatcaacacgtcagccaaactgccctcacagagaaacttccgcccgcccgaggcatggcccccatcagccacgcaggattggcttcagtcagaagcccgaccgccccctggcaacagaagcggcttccattgggcagttatagaagatggcggcgcctgacaaaaaaaaaa

SEQ ID NO: 1875 - DNA, 530 bp, Homo sapiens
  misc_feature (1)...(530): n = A,T,C or G
ttaagagagtgctttgntgaancacacanctatgaggaatgtttagntgaccacagccatacggcgnctcctgnctggctnnctggtgaaaggtcacngtcgatcgtttacgcttgganccaacactttgagaggncacgtganagtttggagagctgcatnagnatagatagcccancagagngggngaccctctgncatttgccactntctgctgcactacgtnggncttngctgacactggnctttgntgangatgctatgatggagatgnnccggctgnttacttctgnttnagcggactcnggctaatnagnggaacctctcagcatttctntggatcgnnnnactgttgctgatttgaggggactggatgactgacnacgaagantgnaaccaccccagagaactgnttctaaccangnctatgacccccttgtnttgttagccatctnnctgncctacctttggncgatgggctaagggaggntgaagtgttnaagancctttattaaaggctgtgcaggggt

SEQ ID NO: 1876 - DNA, 532 bp, Homo sapiens
  misc_feature (1)...(532): n = A,T,C or G
gactgagagacatgatgaggctcctagactgtgcgtcaggggactgcccaggacttggaaggccatgatgactcggtccacctgtnnangntcactccatcngncagactgctcttcacagcatgctcacaacgagatcctggtgtggnaagccaccngatccctgagctatngctaggaacataggcattaaaagccagactgnggattgctgtatgccgagccaggatggctgcgacaggcttcaganctgcattgtttgnaatntgggtgaaatntgaanagattcanggaggctgaggntgnggcagtgacttaaaatctgngaagtgtggttttgaccctcanaaccactccctcctacacaaaacttggcatactgggttgtttttcacatgaaggntgctttattgcttttatttnngcagtttangganatanncnctggcatttattatagcgacatcncatagagcgaacacntactctgatggaagccggtcttgtcnattcaggatgatctggacgaaga

SEQ ID NO: 1877 - DNA, 316 bp, Homo sapiens
gaaagatccagactggctttcatgtgaaacagataatttgttatcattgctgcttctggacacttcctgaatgcttgtcacgcccggagattgcttgctgtctcaaggacatattcttcttaggcatgcaatgagaggccctcaatcaataccctggtcctgctacttcctaactatcctgaatgctgggattacaggtgcgcaacaacatacttggtttatgtggtgctgagtatcaaacccagggtacttgtgcatgctaccaactgagctacatctctttcatgtcccttgtcaactgctttttttttttttc

SEQ ID NO: 1878 - DNA, 290 bp, Homo sapiens
  misc_feature (1)...(290): n = A,T,C or G
gaacagcatggacacagcactcagactacgtacctgtgagatgccagaaaagtcagaggccaagaaaaattccatgacttnctttaggcaactttactggngagaccccctgctcatnattcctgagcaggcttatcttaagtntgttccttcagttgcatanctatanncacagtgancttgttgtgnaaccagagcctgcatctggcatggatcctccactgagaaaagacatcaagaagcgnnagntggattatcagnaagtgaaagacgctaagcatggctctcaa

SEQ ID NO: 1879 - DNA, 402 bp, Homo sapiens
  misc_feature (1)...(402): n = A,T,C or G
gcgagcaaaggccaggaaagctgtccaacccatggcttccctcctcctcttcccctctgacttccttcctggctgcatccccaaggcgctgcccctcccagtctgtgtcctgagacactcgaagcgggatggaatatcagagctctctatcacggccaccacccagcttcctacgagcgagctatctctgcctccaggaagaaccacccccaaactccatcttgaaaagtcttagggctgaatttttttaaaaagntccccccccaccccaaactncnccacagtgggttcccaggtgcnaagngncttctttctggnatanaacttgngcatntttacttaaangatganaaggagagacccaatncctgnnagttgtctnctgacctagatccttgcgtg

SEQ ID NO: 1880 - DNA, 250 bp, Homo sapiens
  misc_feature (1)...(250): n = A,T,C or G
ctagagaggtgccccctgcaagccatcctgctggntgnacttgaacccttttnagcttgntagtaaataggggnnaaaantttaaaaccnaacagctgnccttgcagatgatcaaagccggaacccangcttgcttccccgcagttaaaaggcccnnctctgatgtgaaggaaaaaaaacagtgnttcaagcccgngcccccattcnggcccattcaaatgcccagggttcncaaccggggcaaaggaaa

SEQ ID NO: 1881 - DNA, 287 bp, Homo sapiens
  misc_feature (1)...(287): n = A,T,C or G
gccttttcagcgggcaacattcaatatgacgcacatggatgaacagacccttggggtcctctgtatgggaaagagaagctcaccattttggaacaattgttagaagcttgcntgangctggacaacacttgatcttctgatgggagcctttatcaaacacttctcagcgattgnctaagtgaagagaatttctcctgtcncttaagntcccatgcccagacatgcctttgagcctnctggagacttttgtaaacacagatgccagatccccgggctaaagagacttg

SEQ ID NO: 1882 - DNA, 153 bp, Homo sapiens
  misc_feature (1)...(153): n = A,T,C or G
agggtgtgggctgacacggaacaggtcctgctntgctactagtggcctnaacagacngacaagancnngagccttttgcctacctgcncngagaangggccantgactataatcaactataatatnttggnaactgtgagaaggcaacatgtg

SEQ ID NO: 1883 - DNA, 285 bp, Homo sapiens
  misc_feature (1)...(285): n = A,T,C or G
aagtatgttcctggtcctcttgcctntacccgccaagcactcggattacaggaatgcactgccatttcangttttatgccttgccataaatnaagactggagctacaagcacaccagacaagcactcttttcagctgagtcatatccccagctccagggtatagatttttggcatccatactgccaatcactgcatcatactgaaagcactggaaaatatccatcacagaatctgtttatcctcagcatattatgctacttgtaataaacaaatatttatggtta

SEQ ID NO: 1884 - DNA, 423 bp, Homo sapiens
  misc_feature (1)...(423): n = A,T,C or G
ggtgctgtgctgtgttggtggtgggcaagcctgctgatgtcggcaaggctggaccgtgagactacgtgggtgccgatactgtgagacaaggacactcctgatcagctcaggcctctccaatcccttttcctagaaggtttccaatttgccaccagaggctgnaggaagaagggcccttcctcctggatccacccaccctgcatcaaggaggcaagcagaagctgtgtgaggccagagcagtcaaatgactggaagaaagagtctggtgattntgttctgtgccctgggcaagggtgcagacatctcacattaagngnnccganacccagangtgtgtctcgtnaccaccgncttcttancccagaaataacaaattgnatntgtttatnanangcaacatggggtttggggaacccatatgct

SEQ ID NO: 1885 - DNA, 176 bp, Homo sapiens
  misc_feature (1)...(176): n = A,T,C or G
gttctagttaggatcaagggaccnctcagctaaggcatctacaataaggcaggcagcncctctcatatcttgaactcgnttcatagncagacctctanatgaggcaaatatggnttgatttnacagnccanatggggcctgnttncctgaacacagtgatatggctaccgtcaccc

SEQ ID NO: 1886 - DNA, 214 bp, Homo sapiens
  misc_feature (1)...(214): n = A,T,C or G
aactgtgtgtcagggccacactngtggaggtcagangacagcagtcttttttcaccttgtntgnctnaggnagngttntgtnntccattgnaccaggctagctgncctaccagctctcacgaattcttctgtccctatcnantgcagaggtatgttgngtnctggntggtggctctgtggttctgaactctgagccctaagcttgtgtacttat

SEQ ID NO: 1887 - DNA, 160 bp, Homo sapiens
  misc_feature (1)...(160): n = A,T,C or G
tggggctgaggtagcagccnggnctagaggccatagttacntgttgtggaactctcaaaggtgcgnacaggaancgntgggatgnnttnatatatctactgcctcgantngatgaattcggagcgtcngnacccaggcgatcagaacataaaataaaata

SEQ ID NO: 1888 - DNA, 324 bp, Homo sapiens
  misc_feature (1)...(324): n = A,T,C or G
cactcccttggaccctgccccagggtggaatgcgcacaggaggcgtggctanacngaggntaacnntacannctggncgagcccnntnacgtcattnggtgtgnttnacaggagnagcacccncgntgatnnnacgttnacanatanactttggcttnntncccccaggcacaccttctgtatacccggctcacgccaacccacctacttctcaagaagtttgcttgataggtggaggagtggccaagaaaacaacctagaaattgttgacaaggtgaggtcaganaaagcctgtaatttttaattnggtaatatgagaacgga

SEQ ID NO: 1889 - DNA, 249 bp, Homo sapiens
  misc_feature (1)...(249): n = A,T,C or G
ctgggctctctcatctaagctgggaatgctgaaaggtgcttgccacagtgtctggaagtcanccttctgaacttctataaaaaggntagggtgtctgccacattctgtttaaagagtttaagtgatggtactacctgcgctaataagaacataaaaaccaatggctattaatcactgtgtaggtttgctgtgatcttggatgtccgaagtagtagttgtggaaatgtgnaaggggtgatacacctgcta

SEQ ID NO: 1890 - DNA, 160 bp, Homo sapiens
  misc_feature (1)...(160): n = A,T,C or G
cggctctttccagtcccggctacncactggagccaccaatgcacctgcaacantcctanaggacttttcttaantacacctttgnaaagagnnggntagaagaacttaccaagtgagggactgctgactgccctncngnacccttacgtgccggccactc

SEQ ID NO: 1891 - DNA, 256 bp, Homo sapiens
  misc_feature (1)...(256): n = A,T,C or G
gcctgctgctttaatgtataaaccgccttcctgggaattgagaggccagtgctccnnncacaagctncngaacccagaaccagagagaagacgagaaataganaaggaggaagcctccagaacgcaccttttattgcaactgngngtgtgggctggcacagctgttccgtcagctactctttctgcctgaatgnttgcagngtgagcgctncttcaccacaggagactgacttggcaacattgtttcaaatttaaa

SEQ ID NO: 1892 - DNA, 460 bp, Homo sapiens
  misc_feature (1)...(460): n = A,T,C or G
tgctctgagtggatgctataaacaacaataaanacgtgtcatgttcctgnaagcangnacccaggctnccaggnccncancaccgnatctgncatgnggccnncncagtnnatccttcnnnagccancgagganaggtcatcannctttccagngtnaagggacctcnnnccccnnacaaccctaatcttccccatctgctttctcccataagcagaggagagacagacactcaagctgaggtccaaggctgagcaggtgtactgcagtcttatgaaggttctcagaagtaaattccctggagagtcagaccctggatcagtgtgtgtacaggatgtcacctgtaattgtgggaccctggaccgtcacccagcctccctacatctctctttactcttctatgagatggtatggtaataaccaaccttctgaggatccttaaggactagaggaacaaataa

SEQ ID NO: 1893 - DNA, 171 bp, Homo sapiens
  misc_feature (1)...(171): n = A,T,C or G
aggaacatctaccactnaacaggagctcactntccacattgtnnnnagaggaantagncannanagtactggacagaagcaacngtnacttattgaatggaagcgnaaagtgcattggcatttcaaaaccctggacctcaggtggcnanattttaaccccgagacaaggca

SEQ ID NO: 1894 - DNA, 337 bp, Homo sapiens
  misc_feature (1)...(337): n = A,T,C or G
tgcgctatctggcggatatctggatgcttcttctgaccgccatggtacgccaaggaagtatcagccaccagaagtacctgtcatcacagacctgcacctttcttttccctctcaacttgccctgagattggtgatacagccttagtttgtaagcatattccctggagaataagatttcaaggtcttttccaacacagtccaggcaatgaaagaagcagccttcatttgtcctgggatggaagcagtgttccgtgctananggcaacaccagggtttgaagggcgacataattacctgaaaacagaangaagaancagaagctacaatagtaaaaaaa

SEQ ID NO: 1895 - DNA, 262 bp, Homo sapiens
  misc_feature (1)...(262): n = A,T,C or G
gcacagacgggtcacacccancacgtgccaagcagatcagaggccctctcctggcctcccngggcaccaggaacacangagacacatatacataacgngcaggccaaggcangagnaagccagaaagaacgacaggaacgngcacccaccnggaaacgtggaacggagncngngggnacacaccacacagangggaggccacnnccncatnggcagagaggaaaagggnaagnncaccaaggaggagacgagcaaagcccaa

SEQ ID NO: 1896 - DNA, 329 bp, Homo sapiens
  misc_feature (1)...(329): n = A,T,C or G
gactgaggtgtttctttcaggagagtttattacagcaaaggggaaagaggccaggcgtccgggatgcacagaaacactgacgaccctaagatccttggtaaagttcttttcacctgaaagtgatatttctgatggggttgtcttctgtattctcaagaactcggaaatcgaatggntcattttcctgnttttgganatcactggtgnggagatatgacggaaactgacagngatagagaaagccagcatcatagttgccctggaagataaaaagcacaaaaggtgattngtgaacgcagtacgcacctcattcctcgagggttttcttg

SEQ ID NO: 1897 - DNA, 268 bp, Homo sapiens
  misc_feature (1)...(268): n = A,T,C or G
gaaaaggcttccgatctagagctggagnttcanaggttgnangccatncgctgagngctccaagnngnacctgggntctctgccggagcagccaagtgctctcaaccacaaaagcatctctcccatccagcctgcaagcatgcgtaaagacccaaccagaccgaaccagctaaccaaccagccaaccagccaaccagccaaccagccaaccagccaaccagccaaccagccaaccaaccagcaaaaagccccaccaaagcaaaaaaaa

SEQ ID NO: 1898 - DNA, 168 bp, Homo sapiens
  misc_feature (1)...(168): n = A,T,C or G
ggttccatatatcttactgcctagaatctnangaattnggagctcggaacccggnncatcgaanttcctatntcggaagttcctattctntagaaagtntaggaactatntcgacctgcaggcatgcaagctgggggggtcnacgtnganaaggagtgagggctgcat

SEQ ID NO: 1899 - DNA, 170 bp, Homo sapiens
  misc_feature (1)...(170): n = A,T,C or G
aggaggagcacctgaacgggaggaacccaggacccgcggcngtatgctatttnatgggaganagcacncctaggcaccctcatgnnnngggcaaggtgnaggnctgaanactacacacgggaacatgctctccangtacnaagcgatagggnggacgcagatcgtgccca

SEQ ID NO: 1900 - DNA, 291 bp, Homo sapiens
  misc_feature (1)...(291): n = A,T,C or G
ggggttgtttggtggagncggttcattgtccttcctgttctgggctggcagaagtaactcttggaagaggagcctgtcctctgcagggtgtcaggtagtcttttggaataagagataagcagtcgatcctaatgctggagagcctgctccaaaggaccttttgttaggagctggactactggtggggaagaagtggtcatttactggcnatcttgcactatgaatgcgcctttaccacctaaccaaagctcctaactccccaagaattagctgtcctgtgaaaaaaaaaaa

SEQ ID NO: 1901 - DNA, 282 bp, Homo sapiens; identical to SEQ ID NO: 17

SEQ ID NO: 1902 - DNA, 393 bp, Homo sapiens
  misc_feature (1)...(393): n = A,T,C or G
gcagcctacaaacgtgggcgtgaatggtcnttgcctgtgcctgtcaggatgnnngnncaaaccngctgaggggcatgnttgnacctcnggtncctctgcaggactatgngaggaagnntcagatccaaggtctnacagtctgcngaaccactcctgtgtgcgtgaacatgngnngactggnntcnnnntnctactaagaacatggcaaggacctttgactccccactgtagggactaggaaaaagaccctcatgagaagagtctagcaggaagaaaatggaaaggtcatctctatccaaatctcaagagctatgattggctgagctagccctggggtgatccgtgaaatgaagggaaacctgactccaataactgctgccaggagaagccttg

SEQ ID NO: 1903 - DNA, 394 bp, Homo sapiens
  misc_feature (1)...(394): n = A,T,C or G
aggaagaggcagggggaggcgctgangactcacatctattttgcagagncagcaggccgccgctggctgtctaaaacattaggatttgcagagcaatggactatcccacatcaagcgccaacgtcatctttggctagcttttgttcaataaccctttactatcaatatctgtatctgacttaacatcagtttgagtactagataaaacccttggagagtctggctaagcagacagagcacctcctcctgactgtagcccagctaggtgactatcttctccactacatagggggttggaggccagactgggctacctgagactttgtttcaaacttttaaaaagttgctttctaaggggaaaaaaagngagtgagtgagtgagtgagtatgtgtg

SEQ ID NO: 1904 - DNA, 204 bp, Homo sapiens
  misc_feature (1)...(204): n = A,T,C or G
gctacaggctctgccaacatctagcaatgagtcaacngaatcanacangaattaagccggaataccacaanaagttntntggcatgtttctctgtatgaccagngaagaccatcnannaagcaagaccagcgcagcattgngngcccagngaaaactagcgaagnntngcatggaattgaaatgcaagaacatcctttcactgg

SEQ ID NO: 1905 - DNA, 367 bp, Homo sapiens
  misc_feature (1)...(367): n = A,T,C or G
acaggtgttgcgtatgctgttaccggacctacagcatgcttgntnagnnctgtggtgctgaataantttnccatntttncactggccagcgagatggaatagtgagtaaagggcttgcagccatgacttcagccctggncactagatggtggtagaactgactcctaaaagctgttctcactacatgtgaattggggcaagcagccttgcacaacagaaaataagtatcttaaaattagactctacggctaagtgatcctctatctagttacaagtacctcatttcctctcaaatggctgctgatgccaccttagcctgccccatcccagtcctcctgtagtccctgagcggtgcaccacaaaagct

SEQ ID NO: 1906 - DNA, 326 bp, Homo sapiens
  misc_feature (1)...(326): n = A,T,C or G
tttatctgtgacattctnactatgtagtgcatgnngccatncttnnngctnngntcagtgntgcttagncagggaggcataccctgaacacctgtatagnagngacaacactccctgccttcaacatgtccctaagatntctgagcacagcccagcanntcagactctgttcacaggatttntaaacaaggatgcccntggctgtgccgncctgagactacgaaatctctgtcccagagagcctgtataggtgcaggtggtggcangtggcctgnaaggcagcagctaatagcagtgcaggagcaaggcttagagaaaaagaaaaa

SEQ ID NO: 1907 - DNA, 280 bp, Homo sapiens
  misc_feature (1)...(280): n = A,T,C or G
aatgacattataggaaagagaagtcactggatagaagttactatgagaagaagaaagctagganagacaaccaggngctgtacagaagaantgtancttagtctccacatgatggcattttcccctganggaaaganatccacagcngccaagcagccacttgcactgngaattggtctgntgatgacatcatcanagatataaacagcantaatttggaaaaatctgctctaagatactgaagctgttaggaaatggctttctaagggaaaaaaaaaaa

SEQ ID NO: 1908 - DNA, 231 bp, Homo sapiens
  misc_feature (1)...(231): n = A,T,C or G
aggacacaggaggaagagaccttgactgtgtctgcacacacaggctccggcatgaagtggaggatgcaggngttgnacacctatgacttcgtgtatgatcaggcantgaagagccnatctagcacttggggcccgnagnannccgtnntncaggacacggntgagtgagcctatgntaaganatggtanttttgagctttntggtcgagccnntgacatcctgtcatgtgt

SEQ ID NO: 1909 - DNA, 174 bp, Homo sapiens
  misc_feature (1)...(174): n = A,T,C or G
aaggcactgggaccacccaggctgcagncccgtccccaggctgcatcaggcttggggcagctctgntgcccacaagaactganatgcacccggntcctcttggcctcagngnaccccntgctganaaggngctgttncccagatgcctaagangaggcaccatgcacaagacgc

SEQ ID NO: 1910 - DNA, 163 bp, Homo sapiens
atgagtggtggataattgtcattcaggcgcgtctgctcaggggacaaactattcaaggccgctccaagcagtgcttctcctgtttcaagtcagactgccagaaaggcacgctgggtgctgcgactctcagctttcatacagaactggcttttttttttttttt

SEQ ID NO: 1911 - DNA, 380 bp, Homo sapiens
  misc_feature (1)...(380): n = A,T,C or G
agcaagggtggggactcacaanagatcctgcnacagcactttctgctggagcccctgctgatctaatcatttgcatgactatgactacttctccagagactctagagaaccaaggagcccgcagaatatgcctgtaggagattgttgtttgcagaggattgactgtgcttaagggtattcggctggagaccctttagtcttacagatctccggacctccggagacttccagcacacacccacacaggtgaggaggggagctacctcacccgactgattgagctctcccagaactcccagtactgaataatgctgtggtccaagattgtacacacccttaagttctcagagaacccanaagatttgaacacgctaaaatgt

SEQ ID NO: 1912 - DNA, 232 bp, Homo sapiens
  misc_feature (1)...(232): n = A,T,C or G
ctgattggctccctccccagctgtcaaccgaaagcacgttatgcctaaagtcaatctgatgtacagtatcacactgcgccatagctgttggcaggagactatatatagncttcattgctaaccacccaacacacaaagcaacccattacaaacaattataaataagcaaagcaacatattccttatatatagataaataataaangcatagaaaaaactattaaaaaaaaaa

SEQ ID NO: 1913 - DNA, 249 bp, Homo sapiens
  misc_feature (1)...(249): n = A,T,C or G
atgttgactgtgtggagccagaagccaagtctgctttncccatgtgcaggatcctgtnnaacgnccanggcnntgnagatgacaccagggaaagtagngntccnggcaggaccangntgannctacaggacatacggttgagtatactgctntctttncatacctgncaaatccgctncctntgtntnaacttccacatttttcatcaccaccctgcttgaggaaataaacagccccgaaatggtccta

SEQ ID NO: 1914 - DNA, 169 bp, Homo sapiens
  misc_feature (1)...(169): n = A,T,C or G
tagaacagtctcctgccggcgctatggacacagtgccctttctgtatgaggactcagagactgtggagcaagaagagcacagtgtacacagcagaaggggaggagatcccccaggggagctngctcggaagatccagcagctggctcctttgatgagccggaggatgaa

SEQ ID NO: 1915 - DNA, 421 bp, Homo sapiens
  misc_feature (1)...(421): n = A,T,C or G
gagagtgtcctcggccctcctccaagaagaggccattacagatactcctctgcccctggccatgaagaaactcaccccatgtctgatggaactctgccgcttcttccagcaatgcctctgtgcaatccaaaagcgggatttcagttcagaagccataagccttgnagcaaaaatgtcttgagaatgtctgcaagtctgtgtgagcacctaacagtaacttctgncaccaaaccttcaccctggtttcatttccagctcagctgtatttttcagaatccagcatgcccganccaagtcatctgtagaagggaagggnttttctttggaagcagagaacttttgngtnctgtcaatctgtgtnatgcaacaaaggcagaagctttataatcaatggagnaacaccaggcttcaaaaaaaaaaa

SEQ ID NO: 1916 - DNA, 300 bp, Homo sapiens
  misc_feature (1)...(300): n = A,T,C or G
atatgagggatgcctcacagttccaagtgaaggggagaaaaagagagcccgacagtnaaaggcagctttgagccagtgaccccttccgtccagcggaagacatcaaaatggaaacccacgaaagctgtgtagtcacctagaaagaaggctggtgtgatgagaatagcccagggtatcctctgtggggaggcagaaaacttggttggacccaaagtcaagggcaagctacaactagcatctcacttgtgctgcatcatttaagagaacagaaaataaagtttaaaaacacacaaaaaaaaa

SEQ ID NO: 1917 - DNA, 343 bp, Homo sapiens
  misc_feature (1)...(343): n = A,T,C or G
gtccgtttgtgggcaccaggtggaagccgatgatgagaactggttatncnggacccagcccatgangagcagnagangntacaggagagngctntcatctcnctgagaaagagantngnngtgaacatttncatgncagtttnatngcgttaatnaacacacctcaatntatgagaataagaccgatgttttgaaatgannatacagacnanganangattttnacnatgaagacacagaagcagaccgaaaggggaggncaaattcaccatcagcctctgncttgcaccgcantgnagangaaataaacccgtcattncagntgcataaaaaacttaaaaac

SEQ ID NO: 1918 - DNA, 178 bp, Homo sapiens
  misc_feature (1)...(178): n = A,T,C or G
taattgtctaaacatacnagcaccanatanacnnttgctttccagtnggtcggcacttgctggngagactnacaagatgtgaccttgnaagaagtaaggcggtaagccgncgagaattcaaagactggtgccattttgaactctctctntctctatgctnccgtgtcttacaaggaac

SEQ ID NO: 1919 - DNA, 264 bp, Homo sapiens
aactgagtaatataaaagtcgggtcaacaagcatggctctgctggaagatacttgctgccactctgggagattcaatgtcagtccccagaatccacatggtgaaagcagagaatcaattctactaagagcacccttgcctacatgaggccctgtttcaaagattctaaagaggagaaaagatcagcagttcagagcacttagtgttcctaccagagaatacaaatttgggtcctagtacccaaatgtcagcttaaaaaaaaaaa

SEQ ID NO: 1920 - DNA, 233 bp, Homo sapiens
  misc_feature (1)...(233): n = A,T,C or G
cccacagggaatccacagtgcatctctctntcagtgaantcannctcccnacactggatgcatgcgagagtgggtcgaaatgaatggacgccntccttcaatgancnantgacgttcncataacatttccgtagcgagtgagtcatgtgtatttgcgataccaggatgacattctctgaaaggtgagatgnaagtataaaaagagcatatctgcattgtcaataagaattcac

SEQ ID NO: 1921 - DNA, 260 bp, Homo sapiens
  misc_feature (1)...(260): n = A,T,C or G
tggccacagctcacccagccttggcctgccggactcactggnccctgtgctcactgnctacggctggagctttccagatcccggcagcntggcnggtctgcagccttctgaaaaacgtgactnatccagcctgtcaacaaagaaaaggtnctnacagcttgagtgangcctgttatganatnntggtgtgtttccgtggtaatnagnntntaaggacttttcanaangtaantttaatataaacaccgtatctgtggagt

SEQ ID NO: 1922 - DNA, 348 bp, Homo sapiens
  misc_feature (1)...(348): n = A,T,C or G
gaagcttccctcccacaggaattaaaggtgtntatgccatgcgtgttcctcccggcctcctcgggagctgttagcagcataaggagagacggcaatgccttatttattcttacaaaggaactacattgtccagggctctgggaaggcagccaaccatgcactgagttcaatactcagcacctggtgttggagcgtacacctgccatcccagcatcccggaagaagatgcaggagggccacaagttcaaggccgtctttggttacaaagcaagttccaggccaacttggcctgcatgagactctggtctcaaacacacgaaataaaacacacggacacacaaaaaaaaa

SEQ ID NO: 1923 - DNA, 235 bp, Homo sapiens
  misc_feature (1)...(235): n = A,T,C or G
catgtcactgatcctgccaggaccctcagggaagcacctagctgctnantanatnctggaggaangagtgnnggatngaagganggaangaagganggaaggctggggcatagcaccctgaggattcctggtcgatgctgggtgatgaatgaatgagtgagtgaatgagtgattggcaggtgaatgaatgaactctgccatcagactaggaatgtgtgcttaagtaaggcttatg

SEQ ID NO: 1924 - DNA, 173 bp, Homo sapiens
tgaggtgattggcagagcaagtgaggcatcgcgagcggataatggtgtccctgctgtctcagaaccataatttagattgcgtctcttcccggcttggaggtatgattcaggtccctgtccttttgcccaaaacccctaaaagaataaatttcaattaattaaagaagaaaaaa

SEQ ID NO: 1925 - DNA, 151 bp, Homo sapiens
  misc_feature (1)...(151): n = A,T,C or G
ggggcttttgttccccctcccgncatgagacctcagcaggggncagcccaggcaggcgtcttgngaaggtaacctggtaattcactcgccctnactntgccctggctnactttcccattcacttattgttgattctagggaaggggggggg

SEQ ID NO: 1926 - DNA, 256 bp, Homo sapiens
  misc_feature (1)...(256): n = A,T,C or G
ggctacagcgctttccagacatacaggcacagggatggattaatctggaagaataccgntctcctagctaagctgacatgcattgctgataaccccgntcgaccactaagaatattctccaatgacctgtctggntcacctangaaaacacagatctctctaaccaggtctaaacagaagctgtncatgannnnctttcnctaganagntaaagatattanatanttggtanccgaggggagaaactataaaggac

SEQ ID NO: 1927 - DNA, 157 bp, Homo sapiens
  misc_feature (1)...(157): n = A,T,C or G
tcagctcaggaacatatngcagcagatccagganaatggactgtcactatgaagcctngcctggtggctcagatgtgacgccctggnggatgccctgactcgttagaatgccnagcctgccncaccacggtgaccaaaggagagggagcccaagctg

SEQ ID NO: 1928 - DNA, 196 bp, Homo sapiens
  misc_feature (1)...(196): n = A,T,C or G
ttgaggtacggtgcggnctgatntaggcctgngcagaggcctaantacttcttgcggaactctcaanggncggacaggaagcntggntggttccatatagaanaaagacnatnnnaangntnctcangccanggatgtcatcagaggaatacnttcaagtgcaagaaataaataaattttggctgaaaaaaaaaaa

SEQ ID NO: 1929 - DNA, 374 bp, Homo sapiens
  misc_feature (1)...(374): n = A,T,C or G
ccaaccttgtttgggagatttgagccacagcttccacttccatcaatggataattggactcccgttaaggcatgatngnnatgagaacatttaaaagcctgtaaggtgactccactgagcactgcccagggaacattgccagagaagactgtccatcttctaagcaggaaataagactgagacccaagcctcctgaaaatcaaaatgttgataccacacagcccacaaagtcactccgaagccatgtgctgctgttgctgctgagctgaagcaaggactagcttgtacaataagtgttgggaggcgggggtggagaaagttagtcaaggatttactgtgtacccttggctggcctcgaacacaggtatctatag

SEQ ID NO: 1930 - DNA, 367 bp, Homo sapiens
tgagtgaggcccacacagagagactccccaacccagctttgaccctggacctctggggcagcacagaggggataatggagagattgcctttggagaggacagccccagagcccatctgcggagaagcccggagcacaataaagtaaagcccccaggtaaagcgaagctttcctgagtgcatctcactgggaagaaccaagaatccagaggaccgaggacacacacacatgtgaccgggaacacattaaagaagaggaaacaagggggacaagtgttaaaaagaggagtttaatcccctgcatcgtatgaatatgtaaaatcatcgtatgaatatgtaaaatgctatcttctctctgaaaaaaaaaaa

SEQ ID NO: 1931 - DNA, 284 bp, Homo sapiens
  misc_feature (1)...(284): n = A,T,C or G
actcctgattcccctccatctctcctcccgagtgctggcattgcaagtcgcattngtttttgaacctgaaggctatggaagccccaacagngngggaagatgtggcaagatgcaggttttgngagaacatttntgtggtcaaatgganaaatnaaaggattaaatggcaccggggncccaggattttcaaggcatttnnangctgactgccataggttnaagaacctacacacgaagtntncnaggctacatacnaagaccctgtntctgatacaaaacatgct

SEQ ID NO: 1932 - DNA, 217 bp, Homo sapiens
  misc_feature (1)...(217): n = A,T,C or G
cgaaccacgaagaagccgacttctccactngtnatgaaacanaattcacatncttgtctagcctgctgacccatctgctagttatttggacctcgagcttccttacctnnaaaagaagacccttggggatttcataaaaagtatgntgcctggtgactttctatnactttttatcctgtgaggctggaaatntctttctttcctttttttgattaag

SEQ ID NO: 1933 - DNA, 406 bp, Homo sapiens
ggtctttcagggacgtgtgatcctgttgtctctcccttcctggtgccaggaccacaggcctgtgagtgccaccaagcctggtgtacgtgctgagcatccaggtgtgcgctgtgtgtgcacactcattgccgtgctccgccagctgagccacacacccagccactcgtcaacctgcactgtgacagttgttacatgaaggaggtgacctatttataaattattttaaaagcacccagaattgagcgcataatacatgttatttctgaaattgttcctgtgacagtgcaaatcttagaaattatgacctagtggaattcctgttgcttgaaattttcatttccttactgatttatgtaattagaaggcagattcgctgtgaattctggatgtgcttgtattacatttt

SEQ ID NO: 1934 - DNA, 285 bp, Homo sapiens
  misc_feature (1)...(285): n = A,T,C or G
gcctggttcagttctnagaagacccaggnaaaggctcactgtacagtactgaggactagtagaagacggtccanaccagccttgctcagggtatttactgctattaaagaccntgtcncatgatgtcctgattnctgcaggcccangagctnctgtctaccatgccaggcctctttcccatcggctganccctagtctgtcatccccccacccncanacacactcantggtccttggggaagattttacagaggtagaatgnccagttngcacgggtgagctcag

SEQ ID NO: 1935 - DNA, 524 bp, Homo sapiens
  misc_feature (1)...(524): n = A,T,C or G
gactgagcctcttattcttctgaggtatgcttctgctgacccctgacatatcttcaataacccatatcttcaagactgggcctgatttcagaaaagcctgtgaggcnccagcttcaggaacagaccggaagtcccaaaagcgaagtcttaggataccagcatctgggaacagacgtataaaacacagaacaagatcatacaaccccctcccaaagaacagccaggggataaccacagaaatggggaactagcttatctctaaatgggccatctgcgcccgagccctatttcgtcacatggttgattgcgcatggtatcgaaatgtagaccactgatcacctgtcactccctaacacccaccaatgaatttttagattacctaatccttctggagagttccccctgttccctataagaaggcctgagtgcctttgtctggggtcggcaattcaaagaatggttgaccccctacatgctgtctatttctacagaataaacactctttgtttttgcaaaaaaaaaaa

SEQ ID NO: 1936 - DNA, 227 bp, Homo sapiens
  misc_feature (1)...(227): n = A,T,C or G
gtgttccagagaacctntcaccaggcttcaacanacgcctcanacacttgcctggagaccaggccngcccgcacngcgatggtccttcnattacctgcttccaggcaggcttttgccatttgggagccttctaccatgagaccgntacctgttatcccaacactctgcaaactgaggcagaatggtggttacaagctcgaggccagcctgaatgtctccctccgccg

SEQ ID NO: 1937 - DNA, 197 bp, Homo sapiens
  misc_feature (1)...(197): n = A,T,C or G
tcttaggcccttgatccagactgccccaggtttgaagcntcacgtccacagcccatgaggaccacatcttcctcccatccctaaatgccgatcctcttcccacaccacatntggcctcacattgctcggatggtggggtccccatgaacataacgaagagcatatttatgtcaaaaccaactttaataaaaaataaa

SEQ ID NO: 1938 - DNA, 303 bp, Homo sapiens
  misc_feature (1)...(303): n = A,T,C or G
ggaggtccaagtaagaaactaatgtatatgatgctggaaacttttaaacacaaactgcaaatgaatgaaaggcttaaaaaagatatatttttgaagttaccagaaaaatgactatgaaaacagggatcaagaagactgatggaaaaccacttaggagagaaccatagaagatgtacaccttcagaagaggaatgtaaccagagaactcaaaaaaggaaaacataccatgtatgccctcaaaagggtgaaaaagatttatattcgtgtacatgagattactcnaatagataatcaaacatatca

SEQ ID NO: 1939 - DNA, 535 bp, Homo sapiens
gactgagctgagtccagaaacggcagtgtcgagacacctcaaagcaaacctgaagtttatgaccagcatgagaagcaccgtgccagagtctgtgacccagcagatcctgcagcagaaccaaggccgaaaagcctgtgatcggctagtggccaagacgaagaacaagaagaagaagaagaaggctgagggcactgtgttcactgaagaagacttccagaagttccagagggaatattttggcagctagacttcctggaggaatggtggggacaaaagacactaaccctccttggctggacttctgctgtcctgggtccctgcagtgctgtgccacgagcgaccagcaggtggcagtgcaaaactagcctggctcaggaagccatatgctgctatcccagggacactggaacagagctgcaagccctgcagcaaattttccctcaaactgaagtggacttctagtttggcggaaccatcagcaccctgccagaaaagattctgacctgccagctatgaccaggattggttatcaggg

SEQ ID NO: 1940 - DNA, 194 bp, Homo sapiens
  misc_feature (1)...(194): n = A,T,C or G
ttttttgtggttaacttgggggctgnngtnagggagccttgtaacggggccatanntacttctngnggnactctcaaaggtcggacaggaagcatggcnggttccatatatctactgctctcgaatgagangaattntnagcctcggtacccggggatngaagctcctattcggaagngcactatatgtctaga

SEQ ID NO: 1941 - DNA, 291 bp, Homo sapiens
  misc_feature (1)...(291): n = A,T,C or G
gactgagctttttaaatgaaagctttaaagcagcatgtgaagagaggagcngtgccttggcacactccccaacatactccagccacactcggccacgtctggatgtcctgaaaagctgcaactgctctccagtaggaactgccatttcccttcctgcaaagcacagcaggttccctgtggccaaaacgttgctgttttgaaacaatagggtgaagcaccctgcctctatcttaagcttaaaagttatcttacatacaaagagtaaagaaaaactaggctcaaaaaaaaaaa

SEQ ID NO: 1942 - DNA, 161 bp, Homo sapiens
  misc_feature (1)...(161): n = A,T,C or G
tggacgttgttctgtacaccaggcatggnttcaaattgagagacncacgtngcttnngnctccaagtgctgggganaaaggcttgtgcccccatatctgtcttacttatatttggcttattttctactcaatgcaatgatttttgttgatgaaaaaaaaaa

SEQ ID NO: 1943 - DNA, 261 bp, Homo sapiens
  misc_feature (1)...(261): n = A,T,C or G
actgaggtgctgtctttcacccaggccaacaaggncaaggcaccaactggactgcgcggcggagtccgtgcgcttgaagcggatgtcaagaactgatgcaccggcggcttcaagatcctttggcttcagtattgtgcggttctgggtcgcatgggccacgaaaatgtctgatttaacagtgcgcctggagatcactatcatgaactgcttttgcactaaactggctttacacggacgtcagttttagcgagaaaaaaaaaa

SEQ ID NO: 1944 - DNA, 215 bp, Homo sapiens
ggagtgaattcttcccgactctatcccatctgcccctggaacgctgcctcatttcatcgaggagcccgaagatgcatacatcatcaagagcaacccgattgcactcaggtgcaaagcaaggccagccatgcagatcttcttcaaatgcaatggggagtgggtccatcagaatgaacatgtgtccgaggagagcctggatgagagctcaggcgagg

SEQ ID NO: 1945 - DNA, 279 bp, Homo sapiens
  misc_feature (1)...(279): n = A,T,C or G
aggcgaggcggcctgtctttggaagccccagaaggcaccgcccctagcaaccnttggcacttnanantcaaaggcagatgtgcaccagggcaccctctaaagtgcttcactgagcaaacaaggaggcaagattgcctgaaggaggctgcgctcacatcaccactctctccactcctgaaagaaaaaggtcacaccgaatattcaatttgttgctggtcagagcaggatagtccctggtataggatttgttctgtccatcaaaaataaacaagtctgctt

SEQ ID NO: 1946 - DNA, 210 bp, Homo sapiens
  misc_feature (1)...(210): n = A,T,C or G
tgcgtccacttgattaccaaacntngtaatctgcncagtttantnatgtcttntgganganctatgggagaanattatcnnagncacaagtttttnagagggaggcctaanagaccncaggcntgacctctaactagtggaggatgagnctggacttttgatcttctgggctctatcttntaagtgctnttacngaggtttctctgatta

SEQ ID NO: 1947 - DNA, 271 bp, Homo sapiens
tgagggctctgagattccttcagctgaaatgacatgaagacgaagtttggtgatgaggctggagctggggtctggagcgatcaaggatacctcagcattgatgatggttatctcagcggaggcggaggctggaggatccctgcgacttcggtttcattttaacccttcacctgcatctcaggttgccctcacaccacatttcctgcgtggagatgacttggtttctttaaagtgaataactagagagtcctcaacccctcaaaaaaaaaaa

SEQ ID NO: 1948 - DNA, 332 bp, Homo sapiens
  misc_feature (1)...(332): n = A,T,C or G
ctaccacgcccacgtgctggnncctgaggagnnacacactgtncaccttnntantggaccaaagatnattnggnggcaatntgggtccnctncccattccttcatanctagacgtacgcaacaatanaatttgagccttgatcangatggnaaaccanaagcaaaaaccgaatactactcacctcctgaaaatgttgcaaaatcctaaagcatattttcaatatgcatgtagttctaccttacatatataatgagagaatgtatacccatatgttatctactatgttgattaatattattaacatggaatctgttacacagtaaaaaaaaaa

SEQ ID NO: 1949 - DNA, 229 bp, Homo sapiens
  misc_feature (1)...(229): n = A,T,C or G
gactgaggagaagatgcttnaacatgtaaacttaaccaaaggtgccangagtactcaggcagcagagtagcgccatccatgccaagcgagcacttgagaaaggcactgacactgctcatcacatgctcacacgtcagtgcctctggacgtctccagcccagctactacattacgttacatctaggttggttctaaatgcttaagagccaagaaagagaatactgacatt

SEQ ID NO: 1950 - DNA, 177 bp, Homo sapiens
  misc_feature (1)...(177): n = A,T,C or G
caagggcacgaggacaccacagcagcgctgcgacntttcncgcggcaggagnnggcccgagccngacgacngnccnctccacgngcgcaccggcccccgagggagcggccggccagcggccngccgcagggaacgccagcagaagcaaccnctnaccnncccggggcagcgccagcc

SEQ ID NO: 1951 - DNA, 372 bp, Homo sapiens
actgaggtctgagcatcattaacatgagcttcagctccgaagaactaaaacaaccgggtgtgtggctcacatgtataatcccagcccttagaaggcagagaccgggagttcaaagtcattcgtggctacacactgaattcaaagctagcagtgggcttacatgaaatgctatacaagaggaagaggtgagaagaggaggaggaaaagagggagacggctcatttgggctgaagcaagaggattgcagaacaggcagaggccaccctgggctacatgggcctcatggagctcagcagcctcttcactgctatccagctgaggattacctggacctcctgacccttcttgctcctgagactacaggttgcctcg

SEQ ID NO: 1952 - DNA, 251 bp, Homo sapiens
  misc_feature (1)...(251): n = A,T,C or G
gctcttcattttcgtgaggagttcaagccttttagggacgcactgcctggtttctagaaagcaaagaaggtgacaagtcctctattggactcaacaggcacatctctggaactacgccaggatctagcctggctccacaggaggaatccttggagngagaggctncantttttntactgggcngggnggngctctgcatctnggnctttcaattaagagaaattgaagaaggaccaaaaagccacgcgagg

SEQ ID NO: 1953 - DNA, 272 bp, Homo sapiens
  misc_feature (1)...(272): n = A,T,C or G
tgtgtatactactttggtntcccagcagagtagagncattngcaatgctggaccctgggtattcatggaggctaatccaacagttaaggtatnttaaaaccgcncanaagnnctgtgtcagtgggatnaaaaatttgctacctgccaagaaccanattgagtgcctcaggataacctanaccagaatggncanaattgtnatnattntgtnagtngaaaagctaatagnagtgatttcaaataangtaataatttgcatagagaaaaaaaaa

SEQ ID NO: 1954 - DNA, 285 bp, Homo sapiens
  misc_feature (1)...(285): n = A,T,C or G
atgcccacttactggaagacctgcgtgcaaagntccnnggtgccctccgccttcctggagctccttctcctttctctcctgnngtttactntgatgccaaaactgnagtgntcaagcacagctcacctaaatgncngcctnctgggatccaggnagcaangcaccatccgagactgaacgaagcatggtgggcaccactagngnctgtcagttcanntggtgattgtnaggnccttgtnccaananatttntttttaaangatatactaccaagagagccccaca

SEQ ID NO: 1955 - DNA, 229 bp, Homo sapiens
  misc_feature (1)...(229): n = A,T,C or G
aggcttctgtggttaagagtgccgactgcttcttccgaaggttcccggagtttcaaattcccagccaacccaccattgggtggggcttcacaaacccattccccttaaatggaaaattcttggatggcccccttcttttcttngggaggtggtcttggaagancaggcttacaggnggtacctaancctttttaattaaaattaaattaaaattctttttaaaaaaaaa

SEQ ID NO: 1956 - DNA, 294 bp, Homo sapiens
  misc_feature (1)...(294): n = A,T,C or G
aactgagatgcaggcagcactctggacccccncatcatacaggaaccccggngtggtgattgctgngtgtctgcttgtgtctgtcttactcgttggctctgcgttcgtcgctgngagacattataaccagagatgctccagctttccataatctggatacngtatctatgggcagcgtgagccagaggcctgccatttgcttgaccgcctacagncgcgacctctcagaggactagagatatggttgggggngacacctggaaagagcagtgtctggaaacattcccccccccc

SEQ ID NO: 1957 - DNA, 298 bp, Homo sapiens
  misc_feature (1)...(298): n = A,T,C or G
tcttgtgcttggatgtatgctcagacctagtgggcaggaaactgtgtgctgtatcctacaagtccacccacccaggacanttgttgnnccaagaacacacanctcatcaacagtgtancacctatgatttannancatgcanggagccagtgagttggtccccaggtgaaggcacctgcatgccaagcccggacctgagttagaaaacccaggtggnggaagaagaganctgactncagaaagttgccctttgacctccagnatgtgcaagctgaagaggggggacatcacacaagtg

SEQ ID NO: 1958 - DNA, 159 bp, Homo sapiens
  misc_feature (1)...(159): n = A,T,C or G
cctgtgtcctagcgggaaccaagnntgatgactggncagcaccctannanacttctctacnatngggaccgttaggaaggcacacncgtgctcaaacgtgacangcacagaactgggcattcagatcctntgggaggatttggggaggggatatctaat

SEQ ID NO: 1959 - DNA, 220 bp, Homo sapiens
  misc_feature (1)...(220): n = A,T,C or G
cagccatagaagggagaaaagacattaaaattttaataggcccttcctttctgtgcacaaacacaaggaanaaagaattcaccaattctgaagccactctaaatagccacaaaccttctctggttttcaaggtgctgtcaaaatgngatactctgtgataggagagtttagggaagttttatacaactatgttgttcataataaaatgttttctgggtca

SEQ ID NO: 1960 - DNA, 177 bp, Homo sapiens
  misc_feature (1)...(177): n = A,T,C or G
agtatatatggctgtttcacctganangngaccacaccatgccagggngtgtgactcggactnttttaaaagcccagcatngcgacttacaacccttcagggaaacacaccatgcgngannggncaacgcgtaaagtcagatgactctgcttgancatntgacctttaaagccagcc

SEQ ID NO: 1961 - DNA, 169 bp, Homo sapiens
  misc_feature (1)...(169): n = A,T,C or G
atcatccagctgaacgncgagntacacagacctgnggagccgaggagacnggagccgacgcaggccnngtctgcagaatggtacgagttatttggacatgtgaacatgggaanacggagagctttcgtggcctttttatagccggcnttcatcaataaaaatacatgct

SEQ ID NO: 1962 - DNA, 209 bp, Homo sapiens
  misc_feature (1)...(209): n = A,T,C or G
gaaaacatcaaaattggaggaagccttcacagcnggaagttgctatgaaaagtattcgnaattggttttgaaaattatgctgcaagcaattaattgcggctcgttctttgatggtaantntggaatccttaccaacattnctattccngggngttcccttggtcatgngagggatctgtgggaacagaggaggctgagaattctctttt

SEQ ID NO: 1963 - DNA, 166 bp, Homo sapiens
  misc_feature (1)...(166): n = A,T,C or G
ggaaaaaccccgccgcnagcacnggatggagagcaccacattttgccggggcgggaaaacccacannncaaacaanggaggggggagngcccagccccaacaacgggaacgacaacacaacccccgcaccaaggcccagggaagacnggaggaagagggggcagaa

SEQ ID NO: 1964 - DNA, 160 bp, Homo sapiens
  misc_feature (1)...(160): n = A,T,C or G
ctatcaccaccactcatcaccaccaccaccaccaccatcatcgtcgtcntcgtcatnatcatcatnatcgngtgngcatgngtcacagtgngcaaatggagatcannaagacancttctctttttcctgctatgcgtcataatccagagttgctggacgg

SEQ ID NO: 1965 - DNA, 172 bp, Homo sapiens; identical to SEQ ID NO: 18
  misc_feature (1)...(172): n = A,T,C or G

SEQ ID NO: 1966 - DNA, 149 bp, Homo sapiens
  misc_feature (1)...(149): n = A,T,C or G
cccttctgctacaagggcttcagncccaacgtcccacccggcccaagaactgggctcctngncagcgttcctgccccatcccatcctaccttnctgccaactgtcagagatatcatcaataaattgtttgaattattcaaaaaaaaaaa

SEQ ID NO: 1967 - DNA, 149 bp, Homo sapiens
  misc_feature (1)...(149): n = A,T,C or G
ccagcctctcccagacatcaagcaagtttgagaagttgtgcaagagtgacttgctgtgggaacagatagtccagtccacctgtgacaccatcacccctgacatgcgggccttggcganaaacatgggctgnaggcagatgttcctacca

SEQ ID NO: 1968 - DNA, 145 bp, Homo sapiens
caaaaaagaggatctcggaatgttgtctgctgtgcgcactcacgcctacattatgtactagtggatcctatgcacttctgcctttgtgtgtcccttcatctattaaaaataatagtggtatcagaattaaaggaagatgagtaca

SEQ ID NO: 1969 - DNA, 136 bp, Homo sapiens
gactgagcaccttcatgaaactacttcctgttggaatgtggaatttggggaacttgaatctgtatttcctggctgtgaccactctcatattttgctccagaataaactatctcctatctcttttgaaaaaaaaaaa

SEQ ID NO: 1970 - DNA, 148 bp, Homo sapiens
  misc_feature (1)...(148): n = A,T,C or G
gcccgcaaaacccttgcacaacacaaggnagctgatcaacactgggacctccatatactttgtgattttggtattaaattctatgctgaagcatccatgtagaactcanaggaagaaaataaccactggtatagacatgcgactttat

SEQ ID NO: 1971 - DNA, 128 bp, Homo sapiens
  misc_feature (1)...(128): n = A,T,C or G
ttttgaggcatgagccatgagccntngtccccttccatagggatgctttccacggcgaccaggaccaccgtcaccgtcccccccctcagtcccgggattaaaggcngtgtgccacgtaaaaaaaaaaa

SEQ ID NO: 1972 - DNA, 135 bp, Homo sapiens
  misc_feature (1)...(135): n = A,T,C or G
actgagggcttctcactgtaaatggttgcaagccgacaaagctgcacctcctgaaaaagacggacagcccatcgcgtgagctgtagagtttgtggacgcatttctatcggtangaangattgatgttggttgatt

SEQ ID NO: 1973 - DNA, 146 bp, Homo sapiens
gactgagcttcagtaacttgtgattggtggttggctatccagttgttcatcctcacatcaatgcactgccaatgggttatgtcctgtgttgtgacctcatggtttaagtgggaataaagatgagtataagcagtgaaaaaaaaaaa

SEQ ID NO: 1974 - DNA, 145 bp, Homo sapiens
  misc_feature (1)...(145): n = A,T,C or G
gactgagaagaagccatgaggnattctatgctcagctaaatgtacataactgtgaatcaacactaagagcaccggatggttaaggtcaaggagattctcagaaaggatccagangagttccaatatttgaaaatgggaaaaaaaa

SEQ ID NO: 1975 - DNA, 137 bp, Homo sapiens
  misc_feature (1)...(137): n = A,T,C or G
agcagctccctaagggntcttctccttctccttgcaagctctcccttccgttgcacttagaacccagaangaagatnttgatgctggnaaaacggncgaantgcttntggagatcaagtgtgaaaattaaagtattt

SEQ ID NO: 1976 - DNA, 137 bp, Homo sapiens
gactgaggacctcttctgagctgagctgcacctgagagaaacggcaggatcataaagggaccagcaccgtgagtcagggcttgaagcataattgtacataattaaatattcgaatgttaccacgggaaaaaaaaaaa

SEQ ID NO: 1977 - DNA, 149 bp, Homo sapiens
  misc_feature (1)...(149): n = A,T,C or G
gactgagaacagttgagcttaaagagctcctacaggagggtggngcctttcacagctgaaggcctcttctttagcctttctggaaactgtgatgacagctactggtgggaaaaatcactcgggaacagagccatagccctgcttctagg

SEQ ID NO: 1978 - DNA, 104 bp, Homo sapiens
tggccagagctgcatagcaagacctggtcctacaaaaataaaagttaaggcaccgaggtgaggcacagctggtagcgtgcctgcctaggagacacaaaaaaaaa

SEQ ID NO: 1979 - DNA, 147 bp, Homo sapiens
  misc_feature (1)...(147): n = A,T,C or G
ggtctctgactctggctgtcgtgaggatgactttgaantgatcctnctgtctncatttnttgagtactgggcatgtcntgccttgtgtcatcatgcttgatttacaggtcctgggatattgaacacagccctttgcacaagctgggg

SEQ ID NO: 1980 - DNA, 119 bp, Homo sapiens
  misc_feature (1)...(119): n = A,T,C or G
gagaccagatcactccatgnatgaagtgacagctgtggtgaagattgaaaaagatgttggtggcaataatgggggtagcggcaatggtggctggtgccgccttttctcaaaaaaaaaaa

SEQ ID NO: 1981 - DNA, 148 bp, Homo sapiens
  misc_feature (1)...(148): n = A,T,C or G
gactgaggtggagattctagacccagaaggtgtgctgaaggaagcgttggataagctgatgaagcccgaggaagaggagggctgaggncagccgaagcctntccgtgcccctgaacaatgctgaccttctggtatcacgtaactgggc

SEQ ID NO: 1982 - DNA, 142 bp, Homo sapiens
gcacctgatggttaggtcaaggagattctcacaaaggatccagacagaacctgggagaagttcaacaaaaagaatgagtgtgtctctgctaaacatgccacaggtcagtgtcctttccacatttcttttttaaaaaaaaaaa

SEQ ID NO: 1983 - DNA, 130 bp, Homo sapiens
  misc_feature (1)...(130): n = A,T,C or G
tgaaatggaaggtctaaaattgaaangtaaatggatggaaaatctgatatatgtggacatggcagagtatagataaggtgaagaaactgctgtacaaagaagttaaatagctatcccaaaggtcatataa

SEQ ID NO: 1984 - DNA, 145 bp, Homo sapiens
  misc_feature (1)...(145): n = A,T,C or G
gactgagagaccctgancttanaagagctgagtctccttgtgncttatcacagctgtaaagaatacctcccacaaacaatgcaggtggcttaaaacaaaggacataggctcttctgcagttccngggactattgaagtctgaagg

SEQ ID NO: 1985 - DNA, 109 bp, Homo sapiens
  misc_feature (1)...(109): n = A,T,C or G
gactgaggtaatggagacctactggacacgcggngnaagctagtatcttgcaggaagccaagatgaggagagtctttttaaaataatccaaatactgagaaaaaaaaaa

SEQ ID NO: 1986 - DNA, 136 bp, Homo sapiens
  misc_feature (1)...(136): n = A,T,C or G
tgaggggccgcaagctgacgcntcagggtnagcagagcacctggtacaggatcgctggacaggtggcagctgccaacaagaagcattagaacaaaggatgctgggttaataaattgcctcattcataaaaaaaaaa

SEQ ID NO: 1987 - DNA, 110 bp, Homo sapiens
  misc_feature (1)...(110): n = A,T,C or G
atgtgcagctatcacttgtgatnaaagctgccaancnnacgtgctncntcatgaatganctcncccagggatcacctatgtgctactctatccactagaatctattacgc

SEQ ID NO: 1988 - DNA, 128 bp, Homo sapiens
  misc_feature (1)...(128): n = A,T,C or G
catttacatgactaagttgcattcttggaattttaaactaacacagntcatggggcattnctgaccatggcagacatggccaatcaattactgtactcttatagacaaaacatctcagaatcctcagc

SEQ ID NO: 1989 - DNA, 130 bp, Homo sapiens
  misc_feature (1)...(130): n = A,T,C or G
ctagaaactcagcatacagggaggacagtgaantnaccttnnnagaagccacgttcctgttgccctaatctaacaagtttcaacanagaagganacatgagaactttacctgctatgcaataaagcacat

SEQ ID NO: 1990 - DNA, 132 bp, Homo sapiens
  misc_feature (1)...(132): n = A,T,C or G
ttttaaagacagtacagatcatagagcaaggttgcacctctgtatgnngggagatgatgatgtccattgctgtgtgatggcctggaatttaatttatttaattaaaatcaaattggagtttaaaaaaaaaaa

SEQ ID NO: 1991 - DNA, 109 bp, Homo sapiens
  misc_feature (1)...(109): n = A,T,C or G
taaaccaggctggggagccgggtccccgaggtctgattgnccccanaggnntaaaacctnccntaggacncccggntgtgacagggtngtgatggcgcaccaggggcca

SEQ ID NO: 1992 - DNA, 102 bp, Homo sapiens
  misc_feature (1)...(102): n = A,T,C or G
gcaaaccgacacagcccacgagcagaagngaccggggagaanggggagagggcgngcagncagagcccaggggaggaccntcacacacggcaacgggcagca

SEQ ID NO: 1993 - DNA, 138 bp, Homo sapiens
  misc_feature (1)...(138): n = A,T,C or G
ttttgaggtgcgctctcctggttngctttaggatncttcnggnttttacagtcgtnctttttaataataggtanntnagnaaagnacctccgacggcctataaagatgtgccatggcaagatagcaccaaaaaaaaaa

SEQ ID NO: 1994 - DNA, 109 bp, Homo sapiens
  misc_feature (1)...(109): n = A,T,C or G
gcaccaccagacaccagcgtacntccgccgctnctagnccangtgcngcctgnncncagcaagagcnaantgtgtgtgccagaatgcccagaaggtgaggcttagaaga

SEQ ID NO: 1995 - DNA, 141 bp, Homo sapiens
  misc_feature (1)...(141): n = A,T,C or G
gtcctgtttcatgcttnatacatagactggtatgtccttgaatgtccttgaactttgagaaccacntgnactgcctntgcctcctacgtactaagattaaaggnntgcaccaccagccggtctgaagtgacagacaaaaag

SEQ ID NO: 1996 - DNA, 128 bp, Homo sapiens
  misc_feature (1)...(128): n = A,T,C or G
accgaggccataatgtacttcttgaggaactctcaaatntcggacaggaagnaaggcnggtgtccatatagctactgcctcgaatcgangaagncgagctcggtacccggggatcggaaaaaaaaaaa

SEQ ID NO: 1997 - DNA, 128 bp, Homo sapiens
  misc_feature (1)...(128): n = A,T,C or G
tttaagggaagaccgnggaacagcacgagagagccnagagcggggantgggcaggancagacaaaccgagcanaccgcaggngcnnngncccggcaccacccccnngggaggaccggcacccgaggac

SEQ ID NO: 1998 - DNA, 137 bp, Homo sapiens
  misc_feature (1)...(137): n = A,T,C or G
tggtaacttttggtactttttcntggaagggaacccagggtanggtacccccttnaggngggaaaattgcccaaagnacaggcccaaaggaccccagnaacttanggggaacnaaggacccctttggccttggcctt

SEQ ID NO: 1999 - DNA, 125 bp, Homo sapiens
  misc_feature (1)...(125): n = A,T,C or G
catacgtgaggcggggcagatngancaangggggggaacagaccagccnttctcaggngcacngcncaggaacagaggngngtattggaagagnttgctttgngacnacagattatgaatgcatt

SEQ ID NO: 2000 - DNA, 147 bp, Homo sapiens
  misc_feature (1)...(147): n = A,T,C or G
cgcgacgccgagcgggtngcggaaaaggggggnctgtgncngnagcgccagcactcgntacgtcccggaagccggctgcattcttcagcatgctggcaggagctcggnctggatgcggccaccntcggngacaatgacgaggtgccg

SEQ ID NO: 2001 - DNA, 117 bp, Homo sapiens
  misc_feature (1)...(117): n = A,T,C or G
actgaggcccccaaggtntacagcngnccatgactaatacngatcctgccccaatgtcccctccnccctcgagtggangaggaagtaggaggaggaacactccaaccagagtgcaaa

SEQ ID NO: 2002 - DNA, 127 bp, Homo sapiens
  misc_feature (1)...(127): n = A,T,C or G
gcactcagctccggaagtgacgtctcccanaggggccggangtggnagtggngggagggnagatggcggaggngggggagataatcgagggctgccgnctgcccgtgctgnggcgcaaccaggacta

SEQ ID NO: 2003 - DNA, 125 bp, Homo sapiens
agagagtcaccacagacaggcccaagcctcaaaactagctgtgatggacttcccagatttaaactgtaacaaaaacattatgacatagccatatgaagaaatgctgcatagccataaaaaaaaaa

SEQ ID NO: 2004 - DNA, 140 bp, Homo sapiens
  misc_feature (1)...(140): n = A,T,C or G
ccttttctacagagacccctgtctcacattttgaaagaaagaaaagangantttnagaaaaggaaaggaaaggaacgaaacgaagagaagagaagagaagagaagagaagagaagagaagagaagagaagagaaaaaaaa

SEQ ID NO: 2005 - DNA, 128 bp, Homo sapiens
  misc_feature (1)...(128): n = A,T,C or G
acgctccataaagcccgcgagcctacaagctgtggttatncnctctantaacccacgntaaggattcgnaagaagnggnagtttaccgagcatctgncnctggcccaagctgggcaagttgatgcgca

SEQ ID NO: 2006 - DNA, 125 bp, Homo sapiens
  misc_feature (1)...(125): n = A,T,C or G
gaagctcggcccagcgctaaggaagatggagtatgggatcccttgnnngtcagtgtnntactctgagncaangacctgnttntcnatacagaatacatntanctcaggcggcaagctcagaaaaa

SEQ ID NO: 2007 - DNA, 106 bp, Homo sapiens
  misc_feature (1)...(106): n = A,T,C or G
tggacaatgtaaatccaggaacaagctgaggatttaaaagccttgcctgcagagatggncctgngnntgggcttatctggnccattngaataaagagaagagccca

SEQ ID NO: 2008 - DNA, 131 bp, Homo sapiens
  misc_feature (1)...(131): n = A,T,C or G
taatttcacttctacaacatacatcacatacatgcacatctgnaatnccannanttgagaggcaagaggnaaaaggatngctgagaatttgaagccatcttgagcaagatctggtctttaaaaaaaacaaa

SEQ ID NO: 2009 - DNA, 127 bp, Homo sapiens
tgaggagtccagagcttacataaaatggatgtttctcacatgttattgaacactaagtgcataatctattaagtaaaacccaagctgccatggaagaaataccaataaaagtggctgtccgaatcag

SEQ ID NO: 2010 - DNA, 126 bp, Homo sapiens
  misc_feature (1)...(126): n = A,T,C or G
ctacttaccataaacgtgaacgatgcangcggctancagggctcgctcggnngntnaaagtgattgctacacangggcagcaatcgtgaattcagtccccaggagccntggaaagcaggaaggaga

SEQ ID NO: 2011 - DNA, 130 bp, Homo sapiens
  misc_feature (1)...(130): n = A,T,C or G
cacaactgcctagcaataaacagacgacacagganatgtgtnagangctgtggaaagccgcangcatgtncagaaaaccagntancancnnccaaaagggtaaacnacaacnacagagggaagagccaca

SEQ ID NO: 2012 - DNA, 141 bp, Homo sapiens
  misc_feature (1)...(141): n = A,T,C or G
ccgtggtgatggaaggnggatcacatgtcnctctcaccatcaggctacttatgcntggaanggnngtggtcnntatcntnggaaagaaaggagaatctgtnannaagatgcancgaggagagtggtgcacgtatcaacatc

SEQ ID NO: 2013 - DNA, 127 bp, Homo sapiens
  misc_feature (1)...(127): n = A,T,C or G
ggaggtttaaaattgaaaagcnnatggatggcaaatctgatatatgtggtcctacctgacacctantacagngnntcntcanncagttagctccctttcctgcgcccagggaacaagactgtatgat

SEQ ID NO: 2014 - DNA, 145 bp, Homo sapiens
  misc_feature (1)...(145): n = A,T,C or G
gatctgaggataacggaaaaataagcactgattgctttaagaaaaaattgctcttcttccaagaaagaatcttcatgtgaataatantgaagagatgaactgtttgaaactgagttaccgaggacgtaacataaatcaacttttg

SEQ ID NO: 2015 - DNA, 128 bp, Homo sapiens
  misc_feature (1)...(128): n = A,T,C or G
cagcaacaatctgagtgaccngccacaagatatagacaggtagntacttgcattcgaaggtgaggtatangaattgattactaacacactgaganccttancacttacatatgctagcacataaatat

SEQ ID NO: 2016 - DNA, 127 bp, Homo sapiens
  misc_feature (1)...(127): n = A,T,C or G
gtactttcctcaagatccgcttaagagaatctgnntgatggctttggtntgagagntcacgacanntcttgngcaactaagaaagacctcattttccatttgctggancnagaaaaggcaaaaaaca

SEQ ID NO: 2017 - DNA, 144 bp, Homo sapiens
  misc_feature (1)...(144): n = A,T,C or G
tatcggaaaaatttcttcangactctaagtgacataacatgaaggctcttcatcatacggnanaccaggatcnactaacatacanccgtttgctgnnttttatggttatangtacntatggtaatnaagtatgcaaaaatgttt

SEQ ID NO: 2018 - DNA, 149 bp, Homo sapiens
  misc_feature (1)...(149): n = A,T,C or G
gagcggcatttcgcgggcaaacccancccgnggagggcgggggggagccngccagcntanagggngcngncacgngncanaggcagggnacaccgaggagcacanacaccgcgcacgcaaacgncagggagcagagacaacgggagcgg

SEQ ID NO: 2019 - DNA, 109 bp, Homo sapiens
  misc_feature (1)...(109): n = A,T,C or G
cagttttgggttccancncactccctgaacaccttgagaaaagcctactggttccaggaaactgagncgccacgagcctnattcagccncatnttctgagacatgaaaa

SEQ ID NO: 2020 - DNA, 115 bp, Homo sapiens
gactgaggggaggctgacgacgacgcggcgcggctccttcccttcggtccgaaacccctgctgagcgggctggtgtgtcacagtttctccgcggccgccctggcgccgcctctaa

SEQ ID NO: 2021 - DNA, 107 bp, Homo sapiens
ttaagcatggtgtgttctgcccatcttaatctgaagagagcaagaccccatttatctacatctggagtggattaatcagcttaagatcttgaatgaagaaaaaaaaa

SEQ ID NO: 2022 - DNA, 105 bp, Homo sapiens
  misc_feature (1)...(105): n = A,T,C or G
acttatgaccaccctgagggaaatgnctcanggcctgtgttctangagcnnngnatgtagaccttatcaatgtancttncccatggacatggcatgaaagccata

SEQ ID NO: 2023 - DNA, 105 bp, Homo sapiens
  misc_feature (1)...(105): n = A,T,C or G
ggattgggtaggcctctgtaaaancgatcgagagggcanaccacgtcaaggnggncnggttgcagctgcgnaganggntaaagactatgtgcaaagaatctcagg

SEQ ID NO: 2024 - DNA, 141 bp, Homo sapiens
actgaggggatgtcaacggcctggtcagcaacgttgaaagaattgtgggtacggtgaggagaaaagtgaagtaaaagagagcaccccagaaaactctgatgaaaaaagtcaggaaatcctgatagctgaagaaaaataaaa

SEQ ID NO: 2025 - DNA, 106 bp, Homo sapiens
  misc_feature (1)...(106): n = A,T,C or G
atcagaaccgaaaagagtccaaaagaaancatgtcagctatttttaacagnggaacataaanctgnatgactgngggaagnctcccatcccccagcctgaaaccgg

SEQ ID NO: 2026 - DNA, 111 bp, Homo sapiens
  misc_feature (1)...(111): n = A,T,C or G
gattgaggtaacagagggctgaggtttagcctgggcanagnccnnnntgactgcttggggnactctctgaggattggncngggaccancggcanggctgcatactctgata

SEQ ID NO: 2027 - DNA, 101 bp, Homo sapiens
  misc_feature (1)...(101): n = A,T,C or G
cgattgaacggccattattagctttgcttgccaggcctggccaccttngtnngatatctgcaaccncacatcgtggaacaagaggatcaacctgagagtgg

SEQ ID NO: 2028 - DNA, 144 bp, Homo sapiens
  misc_feature (1)...(144): n = A,T,C or G
tccagctacaagcacttgcgtcccctcccgnaacatcctatgccactttngaattctgtgnggcatccttaactttgatcaagacnatgtntctggcactaagatcctgttngtcttcncatgccatcctattgcgagagtaca

SEQ ID NO: 2029 - DNA, 125 bp, Homo sapiens
  misc_feature (1)...(125): n = A,T,C or G
ttacaacaggctacttctgactagngactntncactagctcgaagagcatgagagaccgacgagacgcatgcnntacatgcatcancttcacntttacccagactcanggaatggttccggcttc

SEQ ID NO: 2030 - DNA, 105 bp, Homo sapiens
  misc_feature (1)...(105): n = A,T,C or G
gactgagcatgtctcggatttgcgaggncgcctgagtanaggctcttgccgccnnatctgnccanccaagttcgattncncatacacaaggtcatggatggatga

SEQ ID NO: 2031 - DNA, 130 bp, Homo sapiens
gatagaaggaaaggagtgattcattcccaaaagttgtcttctgacctccgcacatgagcctcctctgaccgccccatgcaccagtgtaaaatgaaggaataaacccatggattttggagaaagaaaaaaa

SEQ ID NO: 2032 - DNA, 126 bp, Homo sapiens
  misc_feature (1)...(126): n = A,T,C or G
tttttaggccaagaaaccnggctcctcctccaaaggaggtggaagaggatantgaagatgaagaaatgtcagaagatgaagatgacagcagtggagaagaggaggtngtcatccctcaaaaaaaaa

SEQ ID NO: 2033 - DNA, 107 bp, Homo sapiens
  misc_feature (1)...(107): n = A,T,C or G
ggagaagttggagcacactggttctgccttctggatcctcatgctgngacatggnttgngaccttntgcagcaggaantttaggcatnatgacatcttacatggctt

SEQ ID NO: 2034 - DNA, 149 bp, Homo sapiens
  misc_feature (1)...(149): n = A,T,C or G
gactgaggctcgcgctgtatgtatatgagtatctacngcntgtgggggcacagaagccgngagcacaccttgctgnctgagatncgnngggaaaanaacatcacatngggtgagcctcctggcttnctgcactcctggtggtgaaaaaa

SEQ ID NO: 2035 - DNA, 115 bp, Homo sapiens
gaggtgctccagtgaactcccctgggactgcgatgaagcctcagaggactccataccactagataaattaccttgggttaatagctccaggatttgtttcagacaacaaaaaaaa

SEQ ID NO: 2036 - DNA, 113 bp, Homo sapiens
  misc_feature (1)...(113): n = A,T,C or G
cttcataacgtggtgtnacaacaataaaantngagccttgancacaaanaaatgntgaaaataaacccgaggatgcanaggnctaccaccacaaagnggaagacatgctggat

SEQ ID NO: 2037 - DNA, 117 bp, Homo sapiens
  misc_feature (1)...(117): n = A,T,C or G
gactataggctccagaatgcccagngntgatattnttatctgcacctagagaacaatggcattctgatgagcggcatcatgcancggatcacatctngggtataacatgggacaata

SEQ ID NO: 2038 - DNA, 113 bp, Homo sapiens
  misc_feature (1)...(113): n = A,T,C or G
catctgagaactgaccttntagaggcgnnaaggagatcnaccctcaatcaccgctaagtacgccatgatgctggtcatgaaacgtttcagtgccacgaccctgagcagttagc

SEQ ID NO: 2039 - DNA, 117 bp, Homo sapiens
  misc_feature (1)...(117): n = A,T,C or G
aactgaggactgaggtggntttgggctgggtagtagcctgggcgnaggccatacttacttcttgaggaactctnaaaggtcngacaggaagcatggntgnctccatataaaaaaaaa

SEQ ID NO: 2040 - DNA, 140 bp, Homo sapiens
  misc_feature (1)...(140): n = A,T,C or G
agacagctacccgtgtgcttacatataatangggttgacagnannctttgtnactgnaaaattctaancaggtatttgtcctcagtcaagaactacatcaggcagggggagtagggcttaaaataataaaataaaataaa

SEQ ID NO: 2041 - DNA, 108 bp, Homo sapiens
  misc_feature (1)...(108): n = A,T,C or G
gactgagatgtaagcaaaatgcccaccatcactcctgccccaccatggtggactgnttcccctaaaactgtgagccaaaataaacactctctccttgaaaaaaaaaaa

SEQ ID NO: 2042 - DNA, 112 bp, Homo sapiens
  misc_feature (1)...(112): n = A,T,C or G
acgactgtactacatcgaaacagagtagnnacgagtgnatgtgcgtccnggtgnacactctgtttcngcnaanaacnagaggaccgctttcatgcccgccactgtatagatt

SEQ ID NO: 2043 - DNA, 115 bp, Homo sapiens
agtacttgaggaaatgctgaacaggttgcagcaagctctaatgaccgcaggccaggcaactcagtcctcacactgctgagataacaaacaaaaagaacaatgtggggcaggagat

SEQ ID NO: 2044 - DNA, 130 bp, Homo sapiens
  misc_feature (1)...(130): n = A,T,C or G
gcaacagggaggagganggaatggatatctctactcgctcnaaagatcctggntatacagagaaannggccancgaaacggaagtnccccagccctccanattcntccaatggccattctccccaagact

SEQ ID NO: 2045 - DNA, 133 bp, Homo sapiens
  misc_feature (1)...(133): n = A,T,C or G
gactgagagagcagaagaaaattattagcagcagccagcaaaatggtgattgaaaaggagcacagtttacaagntgccaaagaagagtgtataaaattgaaggtggacttacttgaacagagtaaaaaaaaaa

SEQ ID NO: 2046 - DNA, 109 bp, Homo sapiens
  misc_feature (1)...(109): n = A,T,C or G
tcgactctacccgcttcaagacnccagatctgtcagacggggacagtgctctttgngattgcnaagccgngcatctcagaccaagaccaggnagcggaggaggagagcg

SEQ ID NO: 2047 - DNA, 125 bp, Homo sapiens
  misc_feature (1)...(125): n = A,T,C or G
tgcgcgacctgggcctggngcagttcagngtgtcggagctcttttccagtatcctcatccctggctctcccttcccacaagtactgtagggttttctaagtaaaacatttttatttatacaaaaa

SEQ ID NO: 2048 - DNA, 109 bp, Homo sapiens
  misc_feature (1)...(109): n = A,T,C or G
accgcagtttcctgcnntccaacccccctaagngtgttaggagatagtcgtcctnntggaagaagagcaagaccnaccagagcaaccggtgagtttttaaaaaaaaaaa

SEQ ID NO: 2049 - DNA, 146 bp, Homo sapiens
  misc_feature (1)...(146): n = A,T,C or G
tcaccacacactccaagatggagaaggcatatggtccataagacttctgtggagntgaggaaaaccccaagactcaccagcatatccaggaagnntcacaggtactncagccaaaacagcagtgcttggtcttagtaggacagata

SEQ ID NO: 2050 - DNA, 107 bp, Homo sapiens
  misc_feature (1)...(107): n = A,T,C or G
ctgaatcaagcccgggatacttggaacggaagnnaagccccncccaaagggcagcgactgncntcccattaacaaggctggnaggtctacaaaggcccattgagtcg

SEQ ID NO: 2051 - DNA, 138 bp, Homo sapiens
  misc_feature (1)...(138): n = A,T,C or G
cgaagggccacaggaaggcnttaggggggngacggaaaanccgcgagcgacggggcaaaagaggcgaggcggggacaaaaggaaancagaaggnnaagacgaggaagaaaannanccggaagggccacgaagaaacac

SEQ ID NO: 2052 - DNA, 108 bp, Homo sapiens
  misc_feature (1)...(108): n = A,T,C or G
ggagaagtttggcggggaccggggnggcaatttgggggggaaaaccaacccccaaggggcccnngccggggncaattttttcggggggccaaaaaaccccacgccccc

SEQ ID NO: 2053 - DNA, 145 bp, Homo sapiens
  misc_feature (1)...(145): n = A,T,C or G
agattttggggggaaanccccagccngggcngacnccncnnggnaaacagtttncaggggggcganaaancccccacagngggaggcagngagcgaagaggcaagaggccacagcaaggggcacaggngacagaagggaagaagc

SEQ ID NO: 2054 - DNA, 145 bp, Homo sapiens
  misc_feature (1)...(145): n = A,T,C or G
ggtaaaaagaatgccctaaattagcaggccgngtcngctggnacctctctggaganttactgancgcctgtggatnnacagcaagatgcagtttcattggngagtaattatggtggatacaaattncggaggattacacctggat

SEQ ID NO: 2055 - DNA, 136 bp, Homo sapiens
  misc_feature (1)...(136): n = A,T,C or G
cggtaacaaagtcgcttgcttgtgntactgggaaacccatgagnaaaggaggnatantacggncagcatgtcngntantggtcggggtggccgttcatggaatnganaacttcatnaatgaggtttcttacattga

SEQ ID NO: 2056 - DNA, 145 bp, Homo sapiens
  misc_feature (1)...(145): n = A,T,C or G
ggggcggcttttggttgggtaaaccggggntgggattcctttgcggcagaagcaggaggtntgnaaggagaggnanagcgngatgggaaaaanagcgngtgtgntggaagacagganaagcngagacnagtcaagagggagagaa

SEQ ID NO: 2057 - DNA, 120 bp, Homo sapiens
  misc_feature (1)...(120): n = A,T,C or G
aaaaaacctgaggacgctgcanttccagcacanggagcatnnctggcatccccgagggatgacgagcntctttcctgcnnagaagatnnaaaaagagcatcctgtacgaggtgaaagtga

SEQ ID NO: 2058 - DNA, 126 bp, Homo sapiens
  misc_feature (1)...(126): n = A,T,C or G
ctaacttaacccacttacattctgaacaacttntgcagggatggaancnncntcgccagcatcacgaactctgcgacatcantcntcgagtaggagangntaaaatnnangctcataaagggggcc

SEQ ID NO: 2059 - DNA, 117 bp, Homo sapiens
  misc_feature (1)...(117): n = A,T,C or G
gagtcactatgaagcaggggcncnagagagtgtnagaccctgacncagngnctacatggagacagngccttctgtgnggnnngaatatacggggcaacatgaatggtcctgaggagt

SEQ ID NO: 2060 - DNA, 125 bp, Homo sapiens
  misc_feature (1)...(125): n = A,T,C or G
tttgttccgcccacaaccagtanggagtagactcctggcatggatcnaccttgctctctctgcngnaagncattcgctnatttctnttagtctgtgtttnactttcacctgttgaacctacccct

SEQ ID NO: 2061 - DNA, 126 bp, Homo sapiens
  misc_feature (1)...(126): n = A,T,C or G
gcccattcccaactattttagcccgcccacagnattatctgtnncctttatngnttctttaaacatgcttattactattatttnagatnttatctaaatctctgtcatggagtttttttcttctga

SEQ ID NO: 2062 - DNA, 118 bp, Homo sapiens
  misc_feature (1)...(118): n = A,T,C or G
actattttgtccgaccacatactgatgtagtanaatagtactcaatgatanaaatgagcctgaatttgagtagacntattaacactgagnaaattatagatctagaagttaagattgt

SEQ ID NO: 2063 - DNA, 132 bp, Homo sapiens
  misc_feature (1)...(132): n = A,T,C or G
aatgtacacagcatgtaccncatggtacctgccccttanggtgcgcngangggganccgttannctccnacgatgtaaagctggacgtttggtntgagcatgtcgangntgcctaactgattatagcaattg

SEQ ID NO: 2064 - DNA, 138 bp, Homo sapiens
  misc_feature (1)...(138): n = A,T,C or G
ctgagactagtgagcaggtttgtgaccaactatggcctgacangcacatnctacantgntgaaccaanntagaaaacgtgatgangaagctcgctcctganctctttgagnnccagccggacctgctccaccagctgg

SEQ ID NO: 2065 - DNA, 105 bp, Homo sapiens
  misc_feature (1)...(105): n = A,T,C or G
tcatgaccaccgtgattggaancagcagcacgtggcactggancagtaaagagtgttgcacgctaatgcatggnnntctagttngcaaggtagactgaatggaat

SEQ ID NO: 2066 - DNA, 129 bp, Homo sapiens
  misc_feature (1)...(129): n = A,T,C or G
ctccattcggctgggctgtgccattaacanctgtagcagcatgaatgtgtggcngcaacacctggcngcaggctgtctacctggtctgcaactacgccattaaggncgantnggatcgggagaggcacc

SEQ ID NO: 2067 - DNA, 110 bp, Homo sapiens
  misc_feature (1)...(110): n = A,T,C or G
tctgttctctgggatcagcatggtggcatgcagtgaccngaacttncatacacagnctncctcatntgaaggtagtgcatcctggacaccatncacgcataatggagact

SEQ ID NO: 2068 - DNA, 120 bp, Homo sapiens
  misc_feature (1)...(120): n = A,T,C or G
acctcagtcccatccactccaaggatagaaggcattntgnnncccanntcctagacnnagcaactagagtatanccagtatatgctnaaggaaaaaccatacgcaccagcaagacattga

SEQ ID NO: 2069 - DNA, 119 bp, Homo sapiens
  misc_feature (1)...(119): n = A,T,C or G
ggaaacaggctatgtgcctactgtgctccctagnggccctctcnggtagccnangttntattgactgctgaagcttggncgtcaaancctgtgcnggcccggctatgaggtgcactctg

SEQ ID NO: 2070 - DNA, 148 bp, Homo sapiens
  misc_feature (1)...(148): n = A,T,C or G
ggggggggaacccccccccccccccnaatttaaanngnggtttttcggggacacgcacacagaattttgggggggggaaacccaaacgcgaaaangaaaacaccacacccccccagttncaggggggaaaaaaaaacccaaaaaaaaa

SEQ ID NO: 2071 - DNA, 106 bp, Homo sapiens
  misc_feature (1)...(106): n = A,T,C or G
ggggtgggaatggagctcgtgagtcagagaagccttgagtgcccctcccacagtggtcatggncacttcctgcttttgttcttccactgagtgacataaaaaaaaa

SEQ ID NO: 2072 - DNA, 110 bp, Homo sapiens
  misc_feature (1)...(110): n = A,T,C or G
ccgcaaatgtgggaagaagaacttccggnacatncaggtngatgaagctaatttattggacttggaaagggctgattggtacctgacaaccctccatatagataggggag

SEQ ID NO: 2073 - DNA, 143 bp, Homo sapiens
  misc_feature (1)...(143): n = A,T,C or G
gtggagtaacggccagggnagagntgtgtcccancnccgagangaagctgatggatctgatcattgnacttaggtcatcagctttgncagcgggcacttttgnctgccncagccatttggnctcatttttttgatttttataa

SEQ ID NO: 2074 - DNA, 128 bp, Homo sapiens
  misc_feature (1)...(128): n = A,T,C or G
acaacctctctgcccggtanactacnaattgcctcctttcaagggaacactatggaatacatcctcaagggctcacaggtccacggaatgaccccttggtgtcncttaaaagcagtcttagtatgtgg

SEQ ID NO: 2075 - DNA, 115 bp, Homo sapiens
  misc_feature (1)...(115): n = A,T,C or G
ttgactggagtcacagaatgagatctttgatctgtcaccttgcacttggaatgtgnaagtgtaccctgcttcttcttctnaaataatncctatcactgaatcctattaaacagtt

SEQ ID NO: 2076 - DNA, 109 bp, Homo sapiens
  misc_feature (1)...(109): n = A,T,C or G
accttataatggaggtgggagcataccgncgagcgccatctctggncacacgtgnnttacgtcccaacnagnangccantntccatttcanttttgacacttatcagct

SEQ ID NO: 2077 - DNA, 123 bp, Homo sapiens
  misc_feature (1)...(123): n = A,T,C or G
gtgagtaccatactatacattaccaatcccttccatccnaccctantcctcaggggngaccctcnctactatntnccaacgaggagccctattctgtactcctncacccaacactctgatcaa

SEQ ID NO: 2078 - DNA, 128 bp, Homo sapiens
ttgcaattgaaaaactacggggcaagctgatgaagattgtaggcatggtatgtttaaaaaaatgggacccttttctgatttgaagatttaaaaaaattattaaagtgaacaaagtttaaaaaaaaaaa

SEQ ID NO: 2079 - DNA, 108 bp, Homo sapiens
  misc_feature (1)...(108): n = A,T,C or G
gcagacattatgtgggaaaccagaccttnaacagctcccaccctgagaatnanttgaccctnacgcngggagccaagccnnccgatccttnacacaaggcctgatcag

SEQ ID NO: 2080 - DNA, 145 bp, Homo sapiens
  misc_feature (1)...(145): n = A,T,C or G
ccggaaagacccgcgnggntccagcgcggagcaanaacccccagacccagncgcggggggagagccacgngagaagaaaggaggggacaacgccggaggaaaaaggacgngnaaggaagggnaggagacccgggcagaagggcac

SEQ ID NO: 2081 - DNA, 102 bp, Homo sapiens
  misc_feature (1)...(102): n = A,T,C or G
ctgtgtgcaccggcaaagcantntgggagcctggngcaaaggcatgcatctggacttcagnataanaagccgctgcccttcntctgggccccaggatgaaac

SEQ ID NO: 2082 - DNA, 138 bp, Homo sapiens
  misc_feature (1)...(138): n = A,T,C or G
cagaagaactaacatgtccttttacaatgagagaccanctctggacaganggggaccaaggggtggtgtgnnnggcccnggcngaccagganctcacctntgtagacntggctggccacaaactcagatatctgcctg

SEQ ID NO: 2083 - DNA, 120 bp, Homo sapiens
  misc_feature (1)...(120): n = A,T,C or G
tcagccaaccgactgaccgancaanctaactaccaaccaacagccnnccnaaccaaccaaantcacangcanaagaaacnacagcttatgggagcatgataaaataattttttcttgtca

SEQ ID NO: 2084 - DNA, 124 bp, Homo sapiens
  misc_feature (1)...(124): n = A,T,C or G
ccaccacatatattcnttgcncctttgnanagnatgagaccattaatattcagnggacacntgcatgcntgcttgntgatacaagagactgggaggcagagaattaaaattctgatcattacca

SEQ ID NO: 2085 - DNA, 106 bp, Homo sapiens
  misc_feature (1)...(106): n = A,T,C or G
cctaggaaaattgtgcaatgcaatggtgacactcgggccgcagtggtagacctcaccacctncaaccacagncccccttcaacaanaggggaagttaaggggttta

SEQ ID NO: 2086 - DNA, 130 bp, Homo sapiens
  misc_feature (1)...(130): n = A,T,C or G
gagaaagaactgaagagagaaaaagctgagaggcncntgtgggctnnctgagatgatgagcggagcaagcangccaggctgccataggaaaatcacattccattcngaacttaaatatatcacatgcgtg

SEQ ID NO: 2087 - DNA, 103 bp, Homo sapiens
  misc_feature (1)...(103): n = A,T,C or G
gatgttttggaatgcaccatgtcccatgcagtggagaagatancatcccnatgaaagagaagaantganngtttntncnaaactggtcattgcacgatctgaa

SEQ ID NO: 2088 - DNA, 136 bp, Homo sapiens
  misc_feature (1)...(136): n = A,T,C or G
ggggaagccgggttgcctnnaaatacctttctttatcaccggtgganccccaggcctgacantnccagcctgctttnttggcggnaaacnananggagnganaagccccttngcggggctcctagcttggatggaa

SEQ ID NO: 2089 - DNA, 141 bp, Homo sapiens
  misc_feature (1)...(141): n = A,T,C or G
gactatgggcctccatnnctaggctacacccagggaacatggaaatagncaggngcctcaaagtanatatgcagagcatgcttggnncatcattgaagaggnggggaaagagatnacgacccacgtatgcagggagcaaga

SEQ ID NO: 2090 - DNA, 117 bp, Homo sapiens
  misc_feature (1)...(117): n = A,T,C or G
gactgaggatcggacgtcaattaacgtcaattaacatctgacgctgccccccccnnganttnatctgnngtgacttgatgttttgctgtgatgtgcagatttctgagaggacaaata

SEQ ID NO: 2091 - DNA, 131 bp, Homo sapiens
  misc_feature (1)...(131): n = A,T,C or G
ttattcgggacacgatcactccatttttgagggganancctgtgntgaagattgaagaagatgcaggagncatttctnggggtngcngnancggacggtgggacctgtcntatccagactcagaaccagca

SEQ ID NO: 2092 - DNA, 124 bp, Homo sapiens
tgaattgcgtacagttttcttactactgaatttctcactggaatcatggaagagaaacagcaaatcatattggccaaaaaaagatggaaggaaaataaagttgctaaaagctgaaaaaaaaaaa

SEQ ID NO: 2093 - DNA, 107 bp, Homo sapiens
  misc_feature (1)...(107): n = A,T,C or G
cttcccagcatgagtctntacaaagcatgtgatgctggngacctattggaacctcantgnanataggntacncttgggaaanccatcatnattgaaagacattgtca

SEQ ID NO: 2094 - DNA, 139 bp, Homo sapiens
  misc_feature (1)...(139): n = A,T,C or G
actaaaagtcatgggtctctgcctccacagacctggagtcagcccacccagctctgaaacaactaatctatttcatatacctctncgaacctagnatctaggaaagaaactcaaacttttatatgctcaaaaaaaaaaa

SEQ ID NO: 2095 - DNA, 133 bp, Homo sapiens
  misc_feature (1)...(133): n = A,T,C or G
ttttttcttcctcctctttttcctttcttcccccccccccttttctccccttcnttcccctcccttcccctcncccctnnntnnttncnctcnttntttttctcttttgttctttgtttttttttgtttcgtc

SEQ ID NO: 2096 - DNA, 131 bp, Homo sapiens
  misc_feature (1)...(131): n = A,T,C or G
acctttggagacgccataatatcaangtgacgcatnagngnacgtcttccttccattgcatcacnaangtggnatgcttgctatgcacaccaagaannntccttagnatgtatagaggcacatggacatca

SEQ ID NO: 2097 - DNA, 141 bp, Homo sapiens
  misc_feature (1)...(141): n = A,T,C or G
gactgagggtctgttggcaactggcccgcncagncagaagggagcagagcagaagaacatggntcagccaacctgtgagtactacagaaatgacagacttcctggatcagcttcagagaggcagctcaactttattcggac

SEQ ID NO: 2098 - DNA, 102 bp, Homo sapiens
  misc_feature (1)...(102): n = A,T,C or G
ccgactaccccttgcttgataggnagggagacaganntagtnatggcgacgcttgatagngnntactacaanntgtataaggccctgggttcaaaccccagc

SEQ ID NO: 2099 - DNA, 143 bp, Homo sapiens
  misc_feature (1)...(143): n = A,T,C or G
gcagcaagcactgccctntagttgggtacctgcgatactacagnttaggaggaagcctctggnnnctattgatctattgacatgctttcacactgaacctangctcaaaggaanactgtagaagaggggtcagaatacttgca

SEQ ID NO: 2100 - DNA, 131 bp, Homo sapiens
  misc_feature (1)...(131): n = A,T,C or G
agcttgatggcacttgngcngctttgggctgnctagcnaagctggaatggcatgangcagcctgcccttnangaaagatngctgatgctnnacattccctgntgataaaaagattttatgagctgtcaaaa

SEQ ID NO: 2101 - DNA, 103 bp, Homo sapiens
  misc_feature (1)...(103): n = A,T,C or G
ccacacttctgtctgatggnagnagcccngctccttccaggaatgncggcntgaccatgctntcagnaaagggggnctccagccaacaccgagcccagcttgg

SEQ ID NO: 2102 - DNA, 101 bp, Homo sapiens
  misc_feature (1)...(101): n = A,T,C or G
ggattcgaataaaccagcnaaccgggcagcggaacnaggtacgtcttccagacgcgtctccgagagtcgngggaganaggtgaactttggtgtgtacctga

SEQ ID NO: 2103 - DNA, 132 bp, Homo sapiens
  misc_feature (1)...(132): n = A,T,C or G
aggcctcatcagccacctcccagnntgaagcgacccgnagcnntcangcctcggncagtcaaggtggagggaagcnaagcctgnnngtgcctggntcttttgcctcacntaacagggactggtgccgcccca

SEQ ID NO: 2104 - DNA, 132 bp, Homo sapiens
gacccctgcccaagagtgacaccattgccaatggtctgggccttcattaaccaagaaaatgtcctacctactttcttacagacatatatgatgggccgcaccttctcaattaaatccacatcttcacagatg

SEQ ID NO: 2105 - DNA, 118 bp, Homo sapiens
ggccgaagtactactgtaaatgtgggcagcaccatcccctaagctgggtgagtagggggtgtcttggacttaataaaaaggagaaagtgagctgagcaccagcattcaaaaaaaaaaa

SEQ ID NO: 2106 - DNA, 142 bp, Homo sapiens
  misc_feature (1)...(142): n = A,T,C or G
ctcccggcttgggaaggagatcaacaacccagtattctgngtnttattgggcccataagaggaatggcgcagactacgctgantatatcaacacagcccaggagtttgatggctcagnactccggagcccggccagatgagg

SEQ ID NO: 2107 - DNA, 141 bp, Homo sapiens
  misc_feature (1)...(141): n = A,T,C or G
atgttaaccagccggcagtttgtcagtagctntggcagtnttccttaaacagtncggntaagntgaaagtccccgtnttgggtggacacngnccagctgnccaaacatnaagagctatgccccatatgatgagaactggtt

SEQ ID NO: 2108 - DNA, 127 bp, Homo sapiens
  misc_feature (1)...(127): n = A,T,C or G
ggagccaaaaaacagaagangatnncccttgagaaanaaancctggactgggagagctncncggnangaagaggggattggngaagaactggccatcnataaccgagggaaagaagggtacattgag

SEQ ID NO: 2109 - DNA, 106 bp, Homo sapiens
  misc_feature (1)...(106): n = A,T,C or G
agaaaaacaggtatcctgtcctgtanaatcacctgctntgtntgttnggnattntntnccgaataagnttataacagaaaggaatatttcaggctattttggctta

SEQ ID NO: 2110 - DNA, 141 bp, Homo sapiens
  misc_feature (1)...(141): n = A,T,C or G
ctgatgacctgagttccaggctgaaggccannatggtaggactggacagnangcctncaacttgtnctttggcctacacaaacacacacaccataacatgtacattccacacacatacctacacacatacaaaaaaataaa

SEQ ID NO: 2111 - DNA, 114 bp, Homo sapiens
  misc_feature (1)...(114): n = A,T,C or G
tacatggctgagtcccggcgggtgantccaagcntgnttgngaaggaggagggacaggacnatgcagatnnncagncntccccctactccctcaatagcattcggccacaccct

SEQ ID NO: 2112 - DNA, 140 bp, Homo sapiens
  misc_feature (1)...(140): n = A,T,C or G
ggggaaagagagaacgnggggtnccttgcagacgaggattatnatganatncacagcgggncgtggacttctgcttactgnngcaaaaatcagnncctccacgcccantaanctacntggaagcctgggcgagacaggcc

SEQ ID NO: 2113 - DNA, 118 bp, Homo sapiens
  misc_feature (1)...(118): n = A,T,C or G
gaactgagatgacaactattatttggggcatataccnggctccttttncnctgaatncacnaccttnctgaagctttgatggggccaggacccggattgggaagagagagatgctctt

SEQ ID NO: 2114 - DNA, 142 bp, Homo sapiens
  misc_feature (1)...(142): n = A,T,C or G
gggagaaattgatgatgngaagcagttgccttaagagatgccangtancgtcagcngtntgtcacacagacgatgaatagcaaaganggaagtcttcatgccggnggcantcctataagacagngtgagttctgcagagctg

SEQ ID NO: 2115 - DNA, 129 bp, Homo sapiens
  misc_feature (1)...(129): n = A,T,C or G
accccggggatggctctgccagncnttgtgcccgnnctgccagggacanaggccaactgctatgcnacacaagatcaagaactccatntgcnaaactgtacnatctaaagtggactgcattttggtaag

SEQ ID NO: 2116 - DNA, 114 bp, Homo sapiens
caggcttctgccctgctggtgttcatacccattcctgagcaacactggtttttgccatggaatccgtagatccagcttgtctgtgcagtaggctactgttcaaaatgaaaaaaa

SEQ ID NO: 2117 - DNA, 141 bp, Homo sapiens
  misc_feature (1)...(141): n = A,T,C or G
tgtttgtcatgggtgtggaatccatcctgtgtcacttggccctggnggtgtgttctgtattggaagtgagcnggcggncaaaggggaagaacatgcagaagctgaagatccaaaggagacacggtgcttacaactgcggta

SEQ ID NO: 2118 - DNA, 102 bp, Homo sapiens
  misc_feature (1)...(102): n = A,T,C or G
aacatggatctcttgnatgtggcctacagcggnacagacacttttggtctctgaggcccntgctggtnctaganaagcgcccttcctgccatgtgtctcttg

SEQ ID NO: 2119 - DNA, 129 bp, Homo sapiens
  misc_feature (1)...(129): n = A,T,C or G
actctggaaacctcaatnggcgtctanggaaaagagagcactctttgtctctctgttgcaacctctgncnttttnagaagcagcacttggcanagcnnaacatgtntagcctctaattaaagaaaagtt

SEQ ID NO: 2120 - DNA, 145 bp, Homo sapiens
  misc_feature (1)...(145): n = A,T,C or G
tgaaggagaggaacctgcngcagataaagtactctcgccaccggntggtgcctccactggacaggcccttnngatgagactaccnatgaagagacagaanactgagccnttgtggcgctcncctagngggggaaaatccctccca

SEQ ID NO: 2121 - DNA, 134 bp, Homo sapiens
ctcatttgactctctgaagtgttaaccttcacaacacctcagaacaccgctatcctgtgagctccgtgaatggaaataacagtgcccaatcacattctgctttaaaagataaatacagaggagataaaaaaaaa

SEQ ID NO: 2122 - DNA, 113 bp, Homo sapiens
  misc_feature (1)...(113): n = A,T,C or G
accaatttgggggggnactacagtagtatgagcgantgcngcagaaagcagtagagactgaaactagaaaanncgngcnnagctttccaagctcattggcctgccgcagggcc

SEQ ID NO: 2123 - DNA, 124 bp, Homo sapiens
  misc_feature (1)...(124): n = A,T,C or G
tataccatccaaacccctctgatcatttacacntgagagacactgagtttaagtactctgacaaattcgtactgactaaagtcaaaacagtaataaatagatttatttattttaaaaaaaaaaa

SEQ ID NO: 2124 - DNA, 144 bp, Homo sapiens
  misc_feature (1)...(144): n = A,T,C or G
gatggatctgggcatgtggcatgggacancngggtagaagctnaacatgaaacanagnctnacagggggattgncntngnagcttgctctctatatgcgannacgcgtcaccgaccagcntttgtcnccccccatccttcaaag

SEQ ID NO: 2125 - DNA, 139 bp, Homo sapiens
  misc_feature (1)...(139): n = A,T,C or G
agattttcgggggcaacccgaagccggcgnggaaggggnggagcgcacggntaanagggagcaggnaagcccacngccggaaccggaggagccacacccgggngcaccgnggcgacggggaccagagaaaaagcgcagc

SEQ ID NO: 2126 - DNA, 136 bp, Homo sapiens
  misc_feature (1)...(136): n = A,T,C or G
cgagggggtaatgactgaagctttgcctcctgccananggaaaggggacgttgcccccactgnggacggcatattgcgaccagacctcgggcaacggtcgacntngaggnnaggcncntgcacatgtttcatgcat

SEQ ID NO: 2127 - DNA, 103 bp, Homo sapiens
caccaagtacattcgtagagctttttaaaaatattttgtggaattgtatttatgagaatcttgtggttaatataaagattttaaaatattctaaaaaaaaaaa

SEQ ID NO: 2128 - DNA, 140 bp, Homo sapiens
  misc_feature (1)...(140): n = A,T,C or G
ttgagagggcatatcaagcaggagacacttctgagcggccncacaagtgncagatgtgggttgggagcagaagcgcctcccgcccntggaacctnttcanagctacctgccatggtgggaattaagagaggggcgctcca

SEQ ID NO: 2129 - DNA, 111 bp, Homo sapiens
  misc_feature (1)...(111): n = A,T,C or G
ctgtaaatcaacactaagagcactagaaggtttcaggtcaaggnnactctnacaaaggatccagaacnancgnngnctggttgctcctcatnatcaatcgtgaggagaaca

SEQ ID NO: 2130 - DNA, 143 bp, Homo sapiens
  misc_feature (1)...(143): n = A,T,C or G
gactgagggatgtaaactactgccccagcccccgcctacctgcctgctaangacatgtgcatcaccactgngatcacnggcggnctcnctctnttgaaactgtaagccctcaataaatttttttccttctatcaaaaaaaaaa

SEQ ID NO: 2131 - DNA, 138 bp, Homo sapiens
  misc_feature (1)...(138): n = A,T,C or G
ggtgaaaggctgtggacaaacaacttgtaccattgacttngctccctgnggngggcncnagccnaangggttaccagccttgacttgntccttgcctttganggatnaccaagcttctctggccatactgaaacaccc

SEQ ID NO: 2132 - DNA, 114 bp, Homo sapiens
  misc_feature (1)...(114): n = A,T,C or G
aggaaccacctccagctgctgagtgcgtgcggncancatntacgnccaccttatagcttggctggtncatacgtcgcacagtacttacaacgtaggcaaacacctcatgcaagt

SEQ ID NO: 2133 - DNA, 127 bp, Homo sapiens
  misc_feature (1)...(127): n = A,T,C or G
ttgcctacatgaaaacattgagnngagagactgntcatcttcatttggttggagcattgcncctgatttcctnngagatgacagaccgggccacaacatgctaccaagcgggtgagctacccacagg

SEQ ID NO: 2134 - DNA, 142 bp, Homo sapiens
  misc_feature (1)...(142): n = A,T,C or G
tccggacccggaagttcatgaccaaccgnntgnttcagaggaancagatggtcattgatgtccttgcatncctgggcaaggcaaccagtaaccaanagnacagcaanatttncngggaaaaaaaaggcttgggggccccccc

SEQ ID NO: 2135 - DNA, 142 bp, Homo sapiens
  misc_feature (1)...(142): n = A,T,C or G
ctgaggtggttgaaaagacccgggnnnagtgggcagaggctgctggaatccatagcagaggaataggcttgatgaagaatggtcaagatgctgccctgccatcgagtggaagtttgagaagtccaaaggcgaaaaaaaaaaa

SEQ ID NO: 2136 - DNA, 115 bp, Homo sapiens
  misc_feature (1)...(115): n = A,T,C or G
ggaggtggcacgtccaaagaactcccttcgctctatcggaccaactccgnagttgtncggtcgtgtanacacaganatctgcctcccctnactgnaccccctatacttgccatat

SEQ ID NO: 2137 - DNA, 117 bp, Homo sapiens
  misc_feature (1)...(117): n = A,T,C or G
tcatgcacatgtatagactgtantatcattctgncattaagctacctgaanagcctactcatacccaatgtgagtcacttaagtaaagataaccctggctatttctaaaaaaaaaaa

SEQ ID NO: 2138 - DNA, 113 bp, Homo sapiens
  misc_feature (1)...(113): n = A,T,C or G
cagcattggaggagactnggtttcctagcataatcngcttcccaggattganctacattttcnngtnttctngaaaattttacttctgtcatanagcgacgtggtaagaaact

SEQ ID NO: 2139 - DNA, 127 bp, Homo sapiens
  misc_feature (1)...(127): n = A,T,C or G
gactgagaacaagagttgaaatcaaagaatctgttcgtggccaagtatattttcattatacagacaatacccagngangacnnnacnnctgtnatggagntgttgatnatgtgggaagcactgaaga

SEQ ID NO: 2140 - DNA, 144 bp, Homo sapiens
  misc_feature (1)...(144): n = A,T,C or G
gcgacagggagactggcgccannagctgattgccnagatgcagcaggatgatgaggggcagggccangtagnccctggcgtncagccttcccaccccacaccctttctgaatcatcaccaataaacttttttaaaaacaaaaaa

SEQ ID NO: 2141 - DNA, 136 bp, Homo sapiens
  misc_feature (1)...(136): n = A,T,C or G
gctgacatgagcttccacnttggacgccnnttgctnnaacctgacgagncantncnntgtgcaccttnctactggaccaaagcattatatcggcggcaannagggtccccatccctcattccttcataacatggtg

SEQ ID NO: 2142 - DNA, 103 bp, Homo sapiens
  misc_feature (1)...(103): n = A,T,C or G
gcttacatatgaaactganccgataggaancacttatcgataaatcccatctgactcctcaatgataaacataggccctgnccacatggaataaagcacacaa

SEQ ID NO: 2143 - DNA, 126 bp, Homo sapiens
  misc_feature (1)...(126): n = A,T,C or G
tctgaatgagtggctcctgncancacnagtccttggcaggcngttgagacacagnctgattgctcagnaantattttgataagtgcgcanaccgtgtatctgtaattacngaagaaaaccataaat

SEQ ID NO: 2144 - DNA, 131 bp, Homo sapiens
  misc_feature (1)...(131): n = A,T,C or G
cccacaggctccatcactctgngaagccactgnncangcagnnggctgactcangtngangcctantgtgaatctcctgcaggcgcccaggtgacgccttatcanctgacccnagccgtgccctggagtga

SEQ ID NO: 2145 - DNA, 111 bp, Homo sapiens
  misc_feature (1)...(111): n = A,T,C or G
ttacgctaactgtggngtcttcactgccacaatgacatcacattccacctcggcccagtgttcattcatctgacagtgcttgccgaatttcttcggaacaaattagtcagg

SEQ ID NO: 2146 - DNA, 144 bp, Homo sapiens
  misc_feature (1)...(144): n = A,T,C or G
atgcacatttggcgccctcacctatcggagtacctgtngtgnccatncctgcnngnaanngcctggcagacaggtgcatganggcatccacgnccagtaggtanttgtccggccngttgtgtgcgccgagtgaagagctgcacc

SEQ ID NO: 2147 - DNA, 136 bp, Homo sapiens
  misc_feature (1)...(136): n = A,T,C or G
gggcacaaccacccaaccggaccnacggacactagcngagctttaggagcnagagaggaacaggcggncgcgggnctcagcatccccgagcncctcggcgcccccgccgcgccccagctcccgggaggaaagcgca

SEQ ID NO: 2148 - DNA, 120 bp, Homo sapiens
  misc_feature (1)...(120): n = A,T,C or G
cccaggcaagcttctgtgacggtagntatgcaaggagcangtntggatnannacnctggagaaagggaaaagttcttcacgccctngnngagagcacagtggcctgtccatagagagcga

SEQ ID NO: 2149 - DNA, 133 bp, Homo sapiens
  misc_feature (1)...(133): n = A,T,C or G
cacatgcaggattatggacgtgcatgcacacgccgttagggncagacagattttttgggagaaacaatatagcntaacagtaaacggntttgaagtcctgacctaaagcaaancacatataaaacaaaacaaa

SEQ ID NO: 2150 - DNA, 115 bp, Homo sapiens
  misc_feature (1)...(115): n = A,T,C or G
gtggcaggcacaccaagcactggtgaggaggggnatcaccntnccagcnganacagctcaggctttcatggnaatcaangctgagctcacgctggngccatcattaactaggtca

SEQ ID NO: 2151 - DNA, 147 bp, Homo sapiens
  misc_feature (1)...(147): n = A,T,C or G
tacggcctggggcctgnaataaagatctcccntttnacctgaggntgantatggctggcatggaatccgagatgaagatcaggcctggcctcaacagcaatcctccgccttccaaaattctggtattaaagatgtctgccaccacgc

SEQ ID NO: 2152 - DNA, 128 bp, Homo sapiens
  misc_feature (1)...(128): n = A,T,C or G
cctcactggtggcattttcaggtagaatgcnnatgagagctgntttgacccacagnctctggnaacangaggacttaaatgaggaacttcctgcaggctcctgtaancagtctcgtataggagagaac

SEQ ID NO: 2153 - DNA, 124 bp, Homo sapiens
  misc_feature (1)...(124): n = A,T,C or G
gaagctcctttaacacaaataganttactcacattccttagcctgtaaanggtgtgcatgtgccagcagggggntctggaatcatgtacgntnagnctgagctcccccatttaattctgataca

SEQ ID NO: 2154 - DNA, 143 bp, Homo sapiens
  misc_feature (1)...(143): n = A,T,C or G
cccaccccacggcccctgggctttnggttctngccccatgggantggggttccattaaggantttccacccccccaaaaccccccttaaggncnaaggcccttncccgnataaaaaaatggcccattttctttcccttaccat

SEQ ID NO: 2155 - DNA, 101 bp, Homo sapiens
  misc_feature (1)...(101): n = A,T,C or G
ggctgctcactagcacctcagtctccattcttcagattctttccatgtgggggttaacatcctttaataaatncttttccttggccacaccaaaaaaaaaa

SEQ ID NO: 2156 - DNA, 105 bp, Homo sapiens
  misc_feature (1)...(105): n = A,T,C or G
gctgaatggagtgcgnatggcggcccgctctcactgacgcngcngngtaggngcngangatgcatgcgcacagatggnncgnttacactgcaaggatgcgacacc

SEQ ID NO: 2157 - DNA, 112 bp, Homo sapiens
  misc_feature (1)...(112): n = A,T,C or G
gttttgagctactctaagctgccagtttcccgcagaaantgaagatttcattggcaaanccaagacaaggaanangagactgacagctgggtgaagggaaagtaaccaccaa

SEQ ID NO: 2158 - DNA, 126 bp, Homo sapiens
  misc_feature (1)...(126): n = A,T,C or G
gaaatgatttcttgggtaaatggncagcaggcagnacanactgnggcactcccaggtgaaccctgcgatcgntgggataggcctcgagtcgcagcacacanaactgcagngatgtggtaagcaaac

SEQ ID NO: 2159 - DNA, 129 bp, Homo sapiens
  misc_feature (1)...(129): n = A,T,C or G
ccatggcatacctacacatgcatacttgacatctacgtataatanttaaantataggatatanntttaaaatgtntcaaactgctagtaatgcacaaganctnagtcattnaagcagctagcccaacct

SEQ ID NO: 2160 - DNA, 135 bp, Homo sapiens
  misc_feature (1)...(135): n = A,T,C or G
agaagtgctagagcatctccntgaggcatncntcccaagtgntgggacgtaaagganggnaccatcacaccatgctgaagncaatgttttattgttaacattgattaccatnaagaactaagatgcctggggcat

SEQ ID NO: 2161 - DNA, 141 bp, Homo sapiens
  misc_feature (1)...(141): n = A,T,C or G
ggtcctccagcttaagagtaatnaccctgtantgtgcctttcccaggncctgacagagtgttcnatgcataatanctgcccaggaactactaacatnaggaatatgtaacaaanataaagtttttcccttaagaccatcat

SEQ ID NO: 2162 - DNA, 144 bp, Homo sapiens
gactgagggcaatctgctggaagctgcccctgctgactacaggtcacaccgagagcatctcttctgcccagacttcttggtggggctttttctattgctttagttcaatcttgatcattcccccaagagatttgctatagcttc

SEQ ID NO: 2163 - DNA, 149 bp, Homo sapiens
  misc_feature (1)...(149): n = A,T,C or G
cggtgaccccacagcagcgccggccggcggcctcgctggaagccgtcctgcagcgcaccggaagtggccgtccccaccgggggtgcgttcggccacgcngcgggaagccgaccttccttccaggaagcagacaaagacaaaaaataaaa

SEQ ID NO: 2164 - DNA, 111 bp, Homo sapiens
  misc_feature (1)...(111): n = A,T,C or G
tttcctcagcccactcaccggcatgattataatctgggagacattttcctaggggtggagtncattcttcagcattgnnaataaagngatggattactgtgatgttctgac

SEQ ID NO: 2165 - DNA, 142 bp, Homo sapiens
  misc_feature (1)...(142): n = A,T,C or G
tggaccagtgagtaaacatagtgctntgagcccgagccacaggccggagtcccacaacnctgctttgctatcttcagtgaagagagaaccgngnaaccacncacagatgcttcttcatgcccttggaagatccctttgccca

SEQ ID NO: 2166 - DNA, 129 bp, Homo sapiens
  misc_feature (1)...(129): n = A,T,C or G
gaactgaggttagagaactngtaactgccaatccctgnntcttttnggaatcctgtatccttaagctgaatgatgcaggggctccccactgctggcttctnacccgcatctcagatgccctaggctttg

SEQ ID NO: 2167 - DNA, 140 bp, Homo sapiens
  misc_feature (1)...(140): n = A,T,C or G
ctgagcctatggggaacagtgcacangggctagggccagggggctcanaccatgggaactnanctactggcattgaggtccaggcntnnaagggatgagncatgtgnntnancaggnaagcaatcaacagaagccttgtg

SEQ ID NO: 2168 - DNA, 142 bp, Homo sapiens
  misc_feature (1)...(142): n = A,T,C or G
acaccacgtgctagtaactgagggtacagctgtgaatgaggccagctaggtctcactgtcccgaacacgtggttcccccccacccccatggtttntgaagacagcanaaaggacaaataaagaatatattacaaaaaaaaaa

SEQ ID NO: 2169 - DNA, 105 bp, Homo sapiens
  misc_feature (1)...(105): n = A,T,C or G
cataggcttggggctgtctgacaaaccancacacctgaanggctctccctgtgctcctgcccgangaggacgntgggagagaagatgaacgagactaacaagaac

SEQ ID NO: 2170 - DNA, 103 bp, Homo sapiens
  misc_feature (1)...(103): n = A,T,C or G
aactctaagtggttatcanagcaactgtaacgatgattctnntgntnngtgaaaacgcttccnctgaaggtcctgganggcgaaggggggggggtagcacagt

SEQ ID NO: 2171 - DNA, 127 bp, Homo sapiens
  misc_feature (1)...(127): n = A,T,C or G
actgagagatggcattccctgtggntttgctggataactgcacgcatgaggaattggaaaactctnctgngnnttactntgtgnanccnaagggtgtgggtgacccgngnacatccacttatgctct

SEQ ID NO: 2172 - DNA, 127 bp, Homo sapiens
  misc_feature (1)...(127): n = A,T,C or G
cggcggagcgacaaggaaggctgaggacancatcnngcnagatnntgatggccgcggagggctcagtntggagctgctgggaagcagccttccgntntgatccctcanatgctgtcacggcaggggc

SEQ ID NO: 2173 - DNA, 107 bp, Homo sapiens
ggcattgacatgcatggtgcatagatttacatgcaagcaaacgcctgtacacgtaaaataagtaataaaagtctttaacacatctctttaaagttcaaaaaaaaaaa

SEQ ID NO: 2174 - DNA, 121 bp, Homo sapiens
  misc_feature (1)...(121): n = A,T,C or G
ccaggccactcaccaatctcanaancttctccatttctnganctttcacaccactgcnctntanttgtggaatttatttctcaagggtagtaaggnaacagacanaaattggacatttcaa

SEQ ID NO: 2175 - DNA, 114 bp, Homo sapiens
  misc_feature (1)...(114): n = A,T,C or G
tgagtaaccttctggtctacctggntgagagagcgcatcctgcagaccacgggactaatcgggttttgggtttataaataaatgtcaccatgaagaaatacctcaaaaaaaaaa

SEQ ID NO: 2176 - DNA, 114 bp, Homo sapiens
  misc_feature (1)...(114): n = A,T,C or G
aaaggaccttttgttaggagctggtctacatgnnggggaagaagtggncattnacctggcatcntgcnctatgaatgcgcacnttactagctaagnaaagctcctaactcccca

SEQ ID NO: 2177 - DNA, 136 bp, Homo sapiens
  misc_feature (1)...(136): n = A,T,C or G
ccctctcaaaccgagcctctgcactcttcaccagggttatcacgcaacatcgtcctgctgtctgcctgnatacagggatgccngcagatttttcaggctgnccaatatcagnnatgataaacatggccgagctccc

SEQ ID NO: 2178 - DNA, 141 bp, Homo sapiens
  misc_feature (1)...(141): n = A,T,C or G
atgttgaacggttcacacnantggcanatcgctacgggtagcaggncgtggganaccngncttgggcantanaatgtggtgcacagggacatttatacancctnattaangaccataactgcngctactggccattttgtg

SEQ ID NO: 2179 - DNA, 145 bp, Homo sapiens
  misc_feature (1)...(145): n = A,T,C or G
tcagcagaaaccacctggcctncagctgcngtgctagtatctctgtcatgacctttctnagcgaagtgaagatcacgcancagaggagaaaccaaggaagagcgtgcatagatcacttatgcactgcatcccccccccccctccg

SEQ ID NO: 2180 - DNA, 108 bp, Homo sapiens
  misc_feature (1)...(108): n = A,T,C or G
ggggaggctctgggcactgtcctgaccatctagcttgaaatccctcgttagctcacaggctggcctgctaagtggtngatgtgnntcctcttacttaaaagaaatgag

SEQ ID NO: 2181 - DNA, 101 bp, Homo sapiens
  misc_feature (1)...(101): n = A,T,C or G
gacagtcacgcctgcttgcgcnngcactgcagcngggtactattaaacagagtgtggatgggacccaatcacagccgctgggttcttctaaagaaaaaaaa

SEQ ID NO: 2182 - DNA, 147 bp, Homo sapiens
  misc_feature (1)...(147): n = A,T,C or G
gactgagcttgctgtcaggatcccgccaggnctacagatggccttcttaaaagcagacgtcctgatctgctttgccctgacccatgcccagcaggctcccagttcatcttctgcattaaagaaagggggttaagattaaaaaaaaaa

SEQ ID NO: 2183 - DNA, 144 bp, Homo sapiens
  misc_feature (1)...(144): n = A,T,C or G
tgagtaatgatggagatggacccaaattagaatttgatgggcttcaataaagcaatagaagattcttcctatcttctggaagctcaggtccagntttggggaaggaggagaacaagtgaaanacngaaaattgataagaagcaa

SEQ ID NO: 2184 - DNA, 109 bp, Homo sapiens
  misc_feature (1)...(109): n = A,T,C or G
attttacgaggctaccgtangggcagaaatngnactgtggagaaaatattgtgtgagccgagtaccngactacactngggtgcttgtcacactaagaaaaaggaaaaaa

SEQ ID NO: 2185 - DNA, 121 bp, Homo sapiens
  misc_feature (1)...(121): n = A,T,C or G
agagccgcagttttagggggaaacacnnaatgngcnntagaggaggaaanaagcagnctnttgnaggagaaagacaaaccaaaantcgagaagcggtggcaaacggaagagacgcacggga

SEQ ID NO: 2186 - DNA, 112 bp, Homo sapiens
  misc_feature (1)...(112): n = A,T,C or G
tcaatgtttctagattcaggatctgaagtgtttgctggagnagttacacttatcaacaccgacaagcctggcacactggaagtgattaagggatgtgtatggactagaactg

SEQ ID NO: 2187 - DNA, 121 bp, Homo sapiens
  misc_feature (1)...(121): n = A,T,C or G
ctgccgtgatgaggccatctcaactagctncngtgcccngttnggacttaatgnaaggtagcctccagaggagaactggcagcgtgagccagttctggcacagtcaggacacttgcttttg

SEQ ID NO: 2188 - DNA, 101 bp, Homo sapiens
  misc_feature (1)...(101): n = A,T,C or G
gtggctgcaccaaccggnctttttaccgnattgtggntgntcacaacaagtgccccagggganggccgatttgcggagcagttgaggcatcctatgatgca

SEQ ID NO: 2189 - DNA, 109 bp, Homo sapiens
  misc_feature (1)...(109): n = A,T,C or G
cagtcacagatgctatagtctggnntcagaagaaggngagttgatagtcaaagcttntcttttttctttttaagagnttgaatnctnacgaattaatgtgtattttttg

SEQ ID NO: 2190 - DNA, 105 bp, Homo sapiens
  misc_feature (1)...(105): n = A,T,C or G
tccaggtgcctttctacatanccatnncacacattacaagctggnnnggatcgcgccangcactgcaagtgtctnctccaatgaagagctccaagagaaaaaaaa

SEQ ID NO: 2191 - DNA, 122 bp, Homo sapiens
  misc_feature (1)...(122): n = A,T,C or G
tctcctgcccatcaataaagcactgntggagagacntangaagaactnatttgccnngctctcccagctctttctacctgaatgcagnctttactctncacngatgtattgattaggatatg

SEQ ID NO: 2192 - DNA, 116 bp, Homo sapiens
  misc_feature (1)...(116): n = A,T,C or G
acctcccgtaggcagcaagnaagaaagaaagtaacgcagtanggnagtaaggagtaaggngtaaggnagtaaaggagaaantnatgtaagnaagaagaagaagaagaagaaaaaaa

SEQ ID NO: 2193 - DNA, 131 bp, Homo sapiens
  misc_feature (1)...(131): n = A,T,C or G
ttgtggttgccagagnaatatctaaagggatgtgatttanaaggacggccatnttntaaggcgncttggagcatgctccaccatagtgataaacttaaggacatgntatgctgctcagctgagagctctca

SEQ ID NO: 2194 - DNA, 135 bp, Homo sapiens
  misc_feature (1)...(135): n = A,T,C or G
tgctgccatctgctgaagnataatggcccaggcctnntagcaacagnganccngancgcctnnacgacagacaggcatcaancatatcactgatgatangtgcgtnggangaaaaaaagcatgattgatctggaa

SEQ ID NO: 2195 - DNA, 101 bp, Homo sapiens
  misc_feature (1)...(101): n = A,T,C or G
tgtgggatggctgtanatccgcctnnacgtgacctaggcctgtgccntgaacacccanacggatcctgnaagcactgcctgttngcctaaagacagaacga

SEQ ID NO: 2196 - DNA, 131 bp, Homo sapiens
  misc_feature (1)...(131): n = A,T,C or G
gtacagcactacatgctcacggtgcngggaatggtcngcagttatggtcngagcagtatgctaggatggatgagtnganatggannnngcacncacangatgactgtgggtattgctcacggccttggact

SEQ ID NO: 2197 - DNA, 102 bp, Homo sapiens
gactgagattctgtaacttaaaactgatccatatgaaggaaatttgtacccaggccaagcgccgacggcagaatgttctccagggaggagttgcctaattgg

SEQ ID NO: 2198 - DNA, 140 bp, Homo sapiens
  misc_feature (1)...(140): n = A,T,C or G
cctagctcctcgtgcttcaaatgtgaggctacaacatatacagattaaagaacgancctgcaggaaacagccntcaaagtagaggatgtcacagttcnactangtctaaagaaagacgagagantgacaccgacctcaga

SEQ ID NO: 2199 - DNA, 108 bp, Homo sapiens
  misc_feature (1)...(108): n = A,T,C or G
actgagtacacatctgtcctggagcangcatttatgatctgttgctgntagaaatgacgatactcaccctgtatgtcaagaanaacttggntgtttgctcctcaccaa

SEQ ID NO: 2200 - DNA, 147 bp, Homo sapiens
  misc_feature (1)...(147): n = A,T,C or G
tgtcaacgtcccagcnnccacatggccgtcctcanatggcatccgtaatganatcctanctgccctnntntggacgtgncntgaagacagcgtacagtggactttgcatataataaataaataaatagccccaggtaaaaaaaaaaa

SEQ ID NO: 2201 - DNA, 129 bp, Homo sapiens
  misc_feature (1)...(129): n = A,T,C or G
accaagaatctgggtagtaanaacaactaaaagaaangagtngcttntctggtaaaacacntgnacagtgtcgtattaaccttnaaggactgntgtttttggacttntnattaggaggaatgggaatgt

SEQ ID NO: 2202 - DNA, 143 bp, Homo sapiens
  misc_feature (1)...(143): n = A,T,C or G
ctggcttgtgaggcctagcaggtgtgagtttggttcccactgcagccagcaagaagatgatgctgagccaggattgccagcaagcaggctgaaaacggcgagcgggcaggtagccctgatgtgctngaggtgctccagtcagg

SEQ ID NO: 2203 - DNA, 130 bp, Homo sapiens
  misc_feature (1)...(130): n = A,T,C or G
attcctgatattcggtgtatacaccctaggctacngcngtaccngggnnnacacagnggttcccctttgcgacgntcttcaggtagagctngncacctgaaacattcctgatgnagcgggtgccctcctc

SEQ ID NO: 2204 - DNA, 123 bp, Homo sapiens
  misc_feature (1)...(123): n = A,T,C or G
gacttcttggacagagacgccatcgaggntctntgcagntaaccngacattttcctctcctttaaaaacacagtacttcagtctcaacaatnagtngggcagggtgcaggccccaagccaagt

SEQ ID NO: 2205 - DNA, 103 bp, Homo sapiens
  misc_feature (1)...(103): n = A,T,C or G
taacttatccactgaaaactgngtgagtcangctaaccggngtgtncagattccagcaccatcagncnacggtgttntcgtggggccccatacgtacctggaa

SEQ ID NO: 2206 - DNA, 119 bp, Homo sapiens
  misc_feature (1)...(119): n = A,T,C or G
agggcaggctgggtctctccgctgccccacagnaggatgcagttcttcggacgcctcgtcaacaccctcagggccacctcaactgtgaaataaacgggtttacactcataaaaaaaaaa

SEQ ID NO: 2207 - DNA, 105 bp, Homo sapiens
  misc_feature (1)...(105): n = A,T,C or G
gcccgcatgaggaattggggaactctcaatgnggattaccgtctgcagcgctatggtgtgatngaccctgaacatncagaagtgctnttctagtctcaacattac

SEQ ID NO: 2208 - DNA, 102 bp, Homo sapiens
  misc_feature (1)...(102): n = A,T,C or G
gactgactgtgctattgctgngaaganacaccctgaccgagancttacaanagaaagcntntgattggggnttgcttgcntgttggtagaggcttagtccat

SEQ ID NO: 2209 - DNA, 136 bp, Homo sapiens
  misc_feature (1)...(136): n = A,T,C or G
cccccccccccccccccccccccccttttctnggtnaaaacncncttgtgtttttttcggntttaaaacnannatcttaccctcntctccnccctccgccctccgctacaanagnctccntcccccataaaccctt

SEQ ID NO: 2210 - DNA, 121 bp, Homo sapiens
  misc_feature (1)...(121): n = A,T,C or G
tgaggtatctacgtcnngaggantgcaacctgtgcctacatagaccttcatacntgaacaatcntngcngcttcattcataacagcttcnaanggggagcanctcaagtgcccatctagga

SEQ ID NO: 2211 - DNA, 108 bp, Homo sapiens
  misc_feature (1)...(108): n = A,T,C or G
gactgagatgtgagctcccagcctcgtcccgtgccaccatggatctcacgaactgggactctgggaaccacaagccaaaataaacgtctnccctttataaaaaaaaaa

SEQ ID NO: 2212 - DNA, 143 bp, Homo sapiens
  misc_feature (1)...(143): n = A,T,C or G
gcacgggctccccatgtcttagnnattnctcgtgtaaaaaacaagtaaagtacttncctctaagctatatttgtnccaattgagaggatctgaggctggntatccaaagcctgcctggaaatgcannctgggtgcagtgtggc

SEQ ID NO: 2213 - DNA, 101 bp, Homo sapiens
  misc_feature (1)...(101): n = A,T,C or G
actggccagcagtttgtggttggtgagncaccccttgcagntgccagatctacccancaaccttgcagatgngggaggncncctgggtcccaggatggctg

SEQ ID NO: 2214 - DNA, 104 bp, Homo sapiens
tcctgcaattcagtcccctaagtgtgttaggagatagtcgtcctcatggaagaagagaagagaagagaagagtaaataaagaaaatatcttaaaaagaaagaaa

SEQ ID NO: 2215 - DNA, 138 bp, Homo sapiens
tctgagcagagaccagctctcaggaccttggctttctgtttgtcacctcatccagcttcccagagactctgggtatgaatagtgcctaaggatgacgaaaattcaaccaaggtccattaaacctgtgtagtaagcaca

SEQ ID NO: 2216 - DNA, 144 bp, Homo sapiens
  misc_feature (1)...(144): n = A,T,C or G
gggaaaaacaaggggaaagggaaagttgggaacttnggccttaacntgggaanccttgggagttgggccaaaaaaccccattncccctttcggcttnggcttttnccttncaaaggttccttctttctttttctggggggggtt

SEQ ID NO: 2217 - DNA, 110 bp, Homo sapiens
attgagggtacgagccgcccccagccctctcacccctgccaccttcctttccccaagaagtgatggtttatgtttgaaggagaataaagctatttttaccaaaaaaaaaa

SEQ ID NO: 2218 - DNA, 145 bp, Homo sapiens
  misc_feature (1)...(145): n = A,T,C or G
tggttacttttagtgcaatancatacaccacaggacgagtaagctcattcgagacctgcaagaccannggacngcactggagaggcggtacagtgnanctnnngtatgttatntttccatnccanacgaaccagcccggcctgga

SEQ ID NO: 2219 - DNA, 115 bp, Homo sapiens
  misc_feature (1)...(115): n = A,T,C or G
ggaagaataactggagactggactcattcaggtggccancanagaggaggaacttgagtgccataagaacaganaactncaccctgacgagagangttcaagagtttgaaggcta

SEQ ID NO: 2220 - DNA, 124 bp, Homo sapiens
  misc_feature (1)...(124): n = A,T,C or G
gggggaaccacagcgnccgnagtttccaggggccaacccccnccccagnacagnangcagcagaacggccangcgcngtgtaggngggggagnaaaaaaacccaggagcgagcagccggaaaaa

SEQ ID NO: 2221 - DNA, 109 bp, Homo sapiens
gctgtgtacttctccagggcagaagggcagcagtttagcccccaggagcagggctgctgtaccaggatgtgatgttggagaactatgggaacgtggctaaaaaaaaaaa

SEQ ID NO: 2222 - DNA, 112 bp, Homo sapiens
  misc_feature (1)...(112): n = A,T,C or G
ggatggggcaaaatgtgcgggaaacggggngcccaattttggggggaaaaccgggcnnaaaggggccgannnagnggncncngtttttggggggcncggaaaacccccccaa

SEQ ID NO: 2223 - DNA, 116 bp, Homo sapiens
  misc_feature (1)...(116): n = A,T,C or G
gagcctgctggttgtcgagcctancgcagtcctgcactgaagaaccatctcctccctctntgctgcntttttttntcctttttctttttcnaanaataaattaatttaaaaaaaag

SEQ ID NO: 2224 - DNA, 116 bp, Homo sapiens
  misc_feature (1)...(116): n = A,T,C or G
tttttggggggaaaaanccaaaacgcaggagnacacggaaagaaacagaggagataggngggnaaaggcaangcagagagggacanaggggaaaaagnncacgaacggaacagagg

SEQ ID NO: 2225 - DNA, 130 bp, Homo sapiens
  misc_feature (1)...(130): n = A,T,C or G
gtatatgaatgcactgttaatcaaagcatgctgcgtataatgctgcgggattagctgcttttgagctgttccgacagtgttgattttgatcagtggtttaaancccaacttcttcccgtattacaagttt

SEQ ID NO: 2226 - DNA, 107 bp, Homo sapiens
  misc_feature (1)...(107): n = A,T,C or G
gatgctcagaggcctcattnagaccagctgntgnctacccacttgctgtgtgaccttggacagcattataactgntctgaacctcagcatnctgattggtaaaaaca

SEQ ID NO: 2227 - DNA, 112 bp, Homo sapiens
  misc_feature (1)...(112): n = A,T,C or G
ggaactgtgctccattcatctgcttccngnccantggngaggcagggagactcagtacagatcccnacagctggnanggaggntnagggtgagccacaggaggggcaccctg

SEQ ID NO: 2228 - DNA, 126 bp, Homo sapiens
  misc_feature (1)...(126): n = A,T,C or G
tattggctcccttgctgtgccccaaccgtncctcangtnacctccccacctatcctagccaatggtgtgtngtgtcctgcgtggcattggaatcacaataaacatggagaatggcaaaaaaaaaac

SEQ ID NO: 2229 - DNA, 130 bp, Homo sapiens
  misc_feature (1)...(130): n = A,T,C or G
tgctaggaactgaacctgggttctgcaagaacaaantcttttaacttctgagccatctttccagctccagttctcccttattaaaaacaacgagagcttgctcctncttcttgctcttgcatcttcccct

SEQ ID NO: 2230 - DNA, 136 bp, Homo sapiens
  misc_feature (1)...(136): n = A,T,C or G
cctttttgggcgaacntgcngcgacgttttaatgtggcaanccgcagcccccactgtagacctcanggacctacntnaactgaacaaccaagaccngnatctggacanatatancatccggtttgcaggaaatgaa

SEQ ID NO: 2231 - DNA, 102 bp, Homo sapiens
  misc_feature (1)...(102): n = A,T,C or G
ttttggggaaccgcaccccacnnttgacangggcaacgaccccacctgcagagagcgcacgctgggccgtnnnggtggccacagcnacccctacctccagga

SEQ ID NO: 2232 - DNA, 112 bp, Homo sapiens
  misc_feature (1)...(112): n = A,T,C or G
aacctggcgtatgactagcagaagaacagccaggcgccanngggcaaccccaggccagcaaaagatgccagantcaaattgcnncctgcagggagagtcagccgaggggaag

SEQ ID NO: 2233 - DNA, 143 bp, Homo sapiens
  misc_feature (1)...(143): n = A,T,C or G
ccaccccactggggcngcnactngccaggtgggggcctttggtttcaaggaaggaatnccttgggttttngtttccttccacactttggcccatttggggaaaaagccaaggttaaagggngggncnttttaaaaacccaaaa

SEQ ID NO: 2234 - DNA, 144 bp, Homo sapiens
  misc_feature (1)...(144): n = A,T,C or G
ggtaacctttgggctgaggnagnagcctgggcnggggccataattacttcttgtggaactctcaaaggtcaggacagttacggnaggaagcagtgtctcttggctcacaaagtctgacaataaaagatattaatatgcaaaaaa

SEQ ID NO: 2235 - DNA, 143 bp, Homo sapiens
  misc_feature (1)...(143): n = A,T,C or G
tggagaactgcctttgcncangctggntccttgtgaggaacgtggctaggctatctgcaacccgctngtccnntcggnnnanctgcggattntanaggctgtgacnagccagcaccggcngcacccagaatttcatgctttcg

SEQ ID NO: 2236 - DNA, 137 bp, Homo sapiens
  misc_feature (1)...(137): n = A,T,C or G
gtttgagctacgtccagctgccgtggcagcgnaccatttcacataataaagtgccctattacatcaagtaagtccacttcagttctcttttatgtaccaagaaaataaagttttaccgaataattgaaaaaaaaaaa

SEQ ID NO: 2237 - DNA, 105 bp, Homo sapiens
  misc_feature (1)...(105): n = A,T,C or G
actccaatcaacatttaccagtcngtntactaaatcttggaagttattcatatgtccagcctgaaaaatgtaagacatatttngaatatgcctgaaaaaaaaaaa

SEQ ID NO: 2238 - DNA, 127 bp, Homo sapiens
  misc_feature (1)...(127): n = A,T,C or G
actgaggatttgaaagtattnntgagggctggntggacctgcgtttttcngagatctcagctanatgtactangagacnaancagagctacntagtgagatcctgtctcgggaaaaaacatgaaaaa

SEQ ID NO: 2239 - DNA, 115 bp, Homo sapiens
  misc_feature (1)...(115): n = A,T,C or G
cacggggcaaaccgcagcaccncgcacgccagagggagaagagcccgtaggggagcggaagancaacgcagncacanaacgncagggaagccagaaacngggaggaaccacacac

SEQ ID NO: 2240 - DNA, 116 bp, Homo sapiens
  misc_feature (1)...(116): n = A,T,C or G
aaacccacacccttcccagagtccacaacatgcaggcatggngaagcatgancatnagctggnancgcctccatgatattnaccaataaagtntnactggatcacatgaaacataa

SEQ ID NO: 2241 - DNA, 115 bp, Homo sapiens
gtgtttggctatggcccacatgcatctagtgccctggaggccagaagagggcatctcatccgcagaactgaagttacagccaatctgcattttaagcagatcagagaaaaaaaaa

SEQ ID NO: 2242 - DNA, 142 bp, Homo sapiens
  misc_feature (1)...(142): n = A,T,C or G
ttatttgagaaacctcctccgaggctttttggaggagctcanccaggcaccgcttcaggaagctgggccgcttcctngaagcctttagctccattcactacaagngaancgnngcgaacaaatatttctcaaataaataaag

SEQ ID NO: 2243 - DNA, 145 bp, Homo sapiens
  misc_feature (1)...(145): n = A,T,C or G
actattccagtgactntgccctatcctgcanaccntntnctgcgncttggnnccaggctcnaagaatgaattggcaanaatggncctnccccctcctttataacagcatatctgccattaaacatgtgaacgtttgaggcagata

SEQ ID NO: 2244 - DNA, 105 bp, Homo sapiens
  misc_feature (1)...(105): n = A,T,C or G
attacactggccccacaagcggtctcctttacgcgggaaancanaagacctcannatccttgaacangctgtctttacaggatggacatatagccaaaaaaccag

SEQ ID NO: 2245 - DNA, 113 bp, Homo sapiens
  misc_feature (1)...(113): n = A,T,C or G
actaaaacacaatcctgcgaatgctngccgnatgtanaattgnccataggaacaggntacggagntcagnttgtgatccgnaaacttggtggaagtttgatcctgactaatta

SEQ ID NO: 2246 - DNA, 120 bp, Homo sapiens
  misc_feature (1)...(120): n = A,T,C or G
tttttttttttaacctntnagacgtgcaataccacctccgctacctcctaagccgagggtcaacacttaccctgaagacatctgtttctcatttcccatctgccccaataaaggacccta

SEQ ID NO: 2247 - DNA, 119 bp, Homo sapiens
  misc_feature (1)...(119): n = A,T,C or G
ccttgggccagcagctagcantgtctcccacacagntgtcctgcgtnctctcanagctggntatttcaacttcannttntgccaccattacgttacctggcccaggaggatggacctgt

SEQ ID NO: 2248 - DNA, 103 bp, Homo sapiens
tggatggtgaagatataccggatttttcaagtttaaaagaagatacttccctccaaaaaaaaatcttttaatgtggaaacaataaatttcacagaaaaaaaaa

SEQ ID NO: 2249 - DNA, 112 bp, Homo sapiens
cattatgcatttctaaataacagtcattctgtttgtctttttaatgctttattcattattgacatttgtagttgagggatccgggggttcaatttattttgatttttttttt

SEQ ID NO: 2250 - DNA, 104 bp, Homo sapiens
ggtgctttgggctgtggtagagcctgggcagtggccataattacttcttgtaggaactctcaaaggtcggacaggaagcatggcctggttccataaaaaaaaaa

SEQ ID NO: 2251 - DNA, 121 bp, Homo sapiens
  misc_feature (1)...(121): n = A,T,C or G
catgttgacgtgcatgagaactncctngggaagagtgggctttnntggattcttctnagaaggatncnnnacaaagaagtgatgctggagacctcacaggaancacgcgcggtataggcta

SEQ ID NO: 2252 - DNA, 128 bp, Homo sapiens
  misc_feature (1)...(128): n = A,T,C or G
caaaattcaaggaaaaaagacaaacaacacccccccccaaaaaacagnacccccgcggncngnngaggcngncgccgngccccgccccccccccccaaccaggacaancnacaaaaacccacacaccc

SEQ ID NO: 2253 - DNA, 121 bp, Homo sapiens
  misc_feature (1)...(121): n = A,T,C or G
gggttttcgggaaagccccnnggtttgggggggaaaaccggngnnggggggaggggggccngggnngangntgggggggaaagaaanccccgccggcgcgggggccggggggggggggggg

SEQ ID NO: 2254 - DNA, 141 bp, Homo sapiens
  misc_feature (1)...(141): n = A,T,C or G
ctgagctggaggtggtgtangnacaggctancnttacnctcatcaaangagcctgcctctgcctatgnccctgcccctgnccgtgnctctgccngngctggnantaaagccactggccatcttacccaaagactcatccac

SEQ ID NO: 2255 - DNA, 141 bp, Homo sapiens
  misc_feature (1)...(141): n = A,T,C or G
acagagaaggaaaagctgagacgncaaaaattaanacnaaccagcacnatnataaataaagaagtcattanacactgaagnactttgtaagcccgntanggnattaaaatttattgttttcccatttatatctaatctgta

SEQ ID NO: 2256 - DNA, 133 bp, Homo sapiens
  misc_feature (1)...(133): n = A,T,C or G
ctcttgagacggaacctttctactgagaaggtgagtaaaagcagacttggtggangtagcnggaagcgaacnggtgcgtgattcaactggtgccaaaggaacgtcngntttcaggaaggtgcagatatcaata

SEQ ID NO: 2257 - DNA, 116 bp, Homo sapiens
  misc_feature (1)...(116): n = A,T,C or G
actctagctccagaggacctgatactcttcttttgcattgaatatatatgctacacctacatacaggccacaacatnacacataaattaaaaataaatctgtttaaaaatcaaaaa

SEQ ID NO: 2258 - DNA, 116 bp, Homo sapiens
  misc_feature (1)...(116): n = A,T,C or G
cctcatgtctccaaggccacaaatgcatcatgctgtgtggccttggagnnntacagcacagagttacccgctcgattanaaccaagactttttctagctctcagcctaccagaagg

SEQ ID NO: 2259 - DNA, 116 bp, Homo sapiens
tgagggaaaatgaaaggactggcgttcattcaagccctgacggctactggattgagattctgaatcctaacaaaatagcaacgattatttagtttcgggagaatgtgcctttgagg

SEQ ID NO: 2260 - DNA, 111 bp, Homo sapiens
  misc_feature (1)...(111): n = A,T,C or G
gcgcgatattcagagagtgtgtatggaactcactcntcgnccactaacgtaactactatctgggcaggcnatcnnactgcctgagatgctgcagaaagctcgttgcgccat

SEQ ID NO: 2261 - DNA, 113 bp, Homo sapiens
agtgtgtctgcaagctggcattcagaagaactgcagagcctcatcgacatggccaagtagacatcggccacaccagaccggtgtgaataaacagcactgtaaaccaaaaaaaa

SEQ ID NO: 2262 - DNA, 109 bp, Homo sapiens
  misc_feature (1)...(109): n = A,T,C or G
aagtggaataaggaggctgagaccancatggtnttcagctgccgagngaannaccagggccaagcctgtagggtacngggagncnctgcctaacggtgcttgtcatgat

SEQ ID NO: 2263 - DNA, 137 bp, Homo sapiens
gagggtcccagcaagcatatcacagagttgaagaaaatccatgtgggatcccagggatgcagtacagtcagccagcttcctgttcctgcccgccatgatttcttcccatgatcctctctaaccaaaataaaccagtt

SEQ ID NO: 2264 - DNA, 113 bp, Homo sapiens
  misc_feature (1)...(113): n = A,T,C or G
agcacctgatggctaaggtcaaggagtactntcacaaaggacccagnacanaaccangggaagaagngnaaccaaanngnttnngagacgactctgctaaacatgccacaggt

SEQ ID NO: 2265 - DNA, 122 bp, Homo sapiens
tgtaatggaatccgatgtcctcttctggtctgtctaagagatctacagtaaataagtaagtaaaaaagaaggaaagaaagacaagaaaaggagagtgaatgaaagattttttaaaaaaagaa

SEQ ID NO: 2266 - DNA, 129 bp, Homo sapiens
  misc_feature (1)...(129): n = A,T,C or G
acttatgggacatcaaggccttttanttncntcttgaatacaganacagaaacgagacttgcagcancntggattanngtntnggaggcangagattgcnggagaaagcaaactgttaagtaaggacga

SEQ ID NO: 2267 - DNA, 147 bp, Homo sapiens
  misc_feature (1)...(147): n = A,T,C or G
cacttagagatcattgcgatgacacccaggnggtgaatgagacccctgatcaattgggaggtggcntaaaggaaannangtaggggaaccattntttggccccggngggggaaaaggccttggccanggcccgttgggaaattttga

SEQ ID NO: 2268 - DNA, 117 bp, Homo sapiens
gactgagccctggggttctgactcaaggcctcagtcaagcgctgaaccacaactgtgtgctgcgagcatttgaacatgcagagacccatgcccatttgtgtgcatttaaaggatacg

SEQ ID NO: 2269 - DNA, 131 bp, Homo sapiens
  misc_feature (1)...(131): n = A,T,C or G
atcatcttcctatgtangtttcatccngtctcggnacctgggacaggctcacctgagggaaggcttgggccacntaagtctaatacatnatttgagttgaattgctggcgccatcataatagaaggagaga

SEQ ID NO: 2270 - DNA, 117 bp, Homo sapiens
  misc_feature (1)...(117): n = A,T,C or G
acctctcttcacatccttagttcacctcctgcagtagnctcctgtcacgcnngactancaatacngtggntaaagtgantacgatggcacnaccannagacacgtgtggcttgtcga

SEQ ID NO: 2271 - DNA, 106 bp, Homo sapiens
  misc_feature (1)...(106): n = A,T,C or G
tatggggacagctttacgaggaaggaanaagatgaacanggattcttgtatgnggnctacagcgggagagaacacttttggcttctgaggcccttgctgggctagg

SEQ ID NO: 2272 - DNA, 141 bp, Homo sapiens
  misc_feature (1)...(141): n = A,T,C or G
tgggtgactggggctatatgatgagtgacccagttcacgttanangtaggtggncactngtcangacatcgntnancacgttgacacgctacccggantatatgcccnggagctatgantngggggttgactaccccacag

SEQ ID NO: 2273 - DNA, 122 bp, Homo sapiens
  misc_feature (1)...(122): n = A,T,C or G
cgtagagtttcagaatcccaggagtcacacnggcggcntnacangtcattttgtaagagagatcngatgcgccncattctgnagngtctgaagacaggtacagcgnactgtacatataataa

SEQ ID NO: 2274 - DNA, 123 bp, Homo sapiens
  misc_feature (1)...(123): n = A,T,C or G
gagagcactgactgctcctccancggntctgatttcnnatcncagcgaccacatggcagctgacaaccaccggttntgngatctgacgccttcttctgatgctgactgaagtcagcaacagtg

SEQ ID NO: 2275 - DNA, 107 bp, Homo sapiens
  misc_feature (1)...(107): n = A,T,C or G
gaggtgggtttgggctgaggtagagcctgggcagaggccataatnacttnttgtggnnctctcanaggncgnacaggaagcatggcatggttccatataaaaaaaaa

SEQ ID NO: 2276 - DNA, 127 bp, Homo sapiens
  misc_feature (1)...(127): n = A,T,C or G
ttccgccatgagatgcagccttcccccctnctccgnncactgaagggnagacgctgganatctcacnnactgnatncctgtctcntgtnccttctgtaacctatagcttcatgcctcctgttctccg

SEQ ID NO: 2277 - DNA, 116 bp, Homo sapiens
  misc_feature (1)...(116): n = A,T,C or G
acgggagcatgctgccaagngccccagacggggancaagactnnnngacaaccanaagantccctaaagctaagacactgcagatcnngactctgcngagtgctatagcgcgcgga

SEQ ID NO: 2278 - DNA, 119 bp, Homo sapiens
  misc_feature (1)...(119): n = A,T,C or G
tggttccatatatctantgnctcnaatcgatgaattctgagctcggtaccctngngatcgaagttnctattcggaagntcctattctctagaaagtataggaacttctcgacctgcggg

SEQ ID NO: 2279 - DNA, 104 bp, Homo sapiens
tcctgcctgcagattcttgcctggtgtatcttattctgacttccccctcagtaagagtgtgacctgaaagttgtaagatgaaataaactctttcctccctaaat

SEQ ID NO: 2280 - DNA, 136 bp, Homo sapiens
  misc_feature (1)...(136): n = A,T,C or G
tgatgcattctcaactcaatnngntaaggaagggggaaataatcctgctagtaagatgagaaaattgaaacgaagccaaagttacatatgagtccgcacttcccagcacaaatacaaacattctaaacaaaaaaaa

SEQ ID NO: 2281 - DNA, 123 bp, Homo sapiens
  misc_feature (1)...(123): n = A,T,C or G
ccatgcgcttctcaacaagacagcaccacccactttcagtgcagtgngngggacattccatttgtatacattgcttngggtaatagacaagatcacaacntattaaaaaccctgttgcatgca

SEQ ID NO: 2282 - DNA, 119 bp, Homo sapiens
gagactgaggcctctcccatgaagacagaaggcgtaagcaaaaagcgagcccatcccgtatttgtgacctagtgtggcagggtatggggagatcggatctcactatggaaaaaaaaaaa

SEQ ID NO: 2283 - DNA, 136 bp, Homo sapiens
  misc_feature (1)...(136): n = A,T,C or G
ctgtgacaggtcttccttnctggctgctgatgnctgcaagtgagagccttggtctctgagaaagcgganntacaanaggatgctccagagtcctttatgagctatcaaggagccataagcagaatctttctttgcc

SEQ ID NO: 2284 - DNA, 125 bp, Homo sapiens
  misc_feature (1)...(125): n = A,T,C or G
gcatctgaacatgagtaactaagatntggaagaantnaanncattctntgatacnctgggtnatttttcaggtgcacngacagaggtgtngnatgcatgcncacgccgtcctgatatgaaaaagt

SEQ ID NO: 2285 - DNA, 111 bp, Homo sapiens
ctgattggtgaattccgtttggcgccaactaggaaaggggcggggcaggcgggcctatcctgagtgtgcagcaattaacgctaaggccactttggtggtgagggaaaaaaa

SEQ ID NO: 2286 - DNA, 107 bp, Homo sapiens
  misc_feature (1)...(107): n = A,T,C or G
taaagagagctgaagngntgtctcaagtcacacgcntggtcattaatagngccctgncattcttttcatgtggaaattcaaacttgctagagctcttcaaaaaaaaa

SEQ ID NO: 2287 - DNA, 124 bp, Homo sapiens
  misc_feature (1)...(124): n = A,T,C or G
tttagccaagtgatctgncggcatgggctnatacctgacacatgtttatagaggcattgtatgncncangtgactgagaggatcccngagnagttttcaggcgcctgtgaaaggtagaaactca

SEQ ID NO: 2288 - DNA, 116 bp, Homo sapiens
  misc_feature (1)...(116): n = A,T,C or G
gaggaaatgagcagcctccttcacngttgaacagcttgcagccctgcatnctactgtacngaatggngtggatgnagcacacctatggncccagccctctgaagagcacctcgtag

SEQ ID NO: 2289 - DNA, 122 bp, Homo sapiens
  misc_feature (1)...(122): n = A,T,C or G
tttgcagactcagctttggggtttcagcggcgaccgnaggntgaagnagccgcacagtagangcccatgctgaaattgaacagtnccgtctgcagagggagaaggngttcaagggcaaggaa

SEQ ID NO: 2290 - DNA, 131 bp, Homo sapiens
  misc_feature (1)...(131): n = A,T,C or G
tcctttttacccagaaggcgaccgctgctgctgaggctgaggccgcctcccanntccaggcggacacctgtcctctggtccggatggtggccggcctgtctgcggcccnccaagggggctgcctcaaacgg

SEQ ID NO: 2291 - DNA, 105 bp, Homo sapiens
  misc_feature (1)...(105): n = A,T,C or G
gaccactcggcacgcagcaggcacctggcncgatggaccagnaaagnangaggaccagttctgattacctgcctcacnagcctcggaaggggcagcagtcctaaa

SEQ ID NO: 2292 - DNA, 131 bp, Homo sapiens
  misc_feature (1)...(131): n = A,T,C or G
ctgggtaggagcctgnncagtaggccataattacttcttgtggaactctcaaaggtcggacaggaagcatggcctggttccatatatctactgcctcgaatcgatgaattcgagctcggtaaaaaaaaaaa

SEQ ID NO: 2293 - DNA, 108 bp, Homo sapiens
  misc_feature (1)...(108): n = A,T,C or G
tgaggaccacacctgcttttttcttcaaatactgnngaannacatggaatattcantgtcagaaaaatnatagctgcttcactgangggctnattatcataggatgga

SEQ ID NO: 2294 - DNA, 140 bp, Homo sapiens
  misc_feature (1)...(140): n = A,T,C or G
aaaatggagaagagtgcanatcncacnctggaattatcctgcctaatgactganactatataacacctngtttaaagaatataccgtaagagggctaattcaaaaagggaaacaataaatgtttgggtttagtcggcctg

SEQ ID NO: 2295 - DNA, 108 bp, Homo sapiens
  misc_feature (1)...(108): n = A,T,C or G
ccaccgaggacctggcaagaaccatagacccnngccggaaggcggaagcaacaggagcgnccaggaanacagaacagggaaggacaggagaagaaagacaccagccag

SEQ ID NO: 2296 - DNA, 131 bp, Homo sapiens
  misc_feature (1)...(131): n = A,T,C or G
tgtgtgtggtatgagnaaccaagacctaggancnctctgnnaagagcacgnncaantaccttntttgcatgagagcatcggctccatgctcctatcgaccnncattcattgttccctgcccaccgcgcctg

SEQ ID NO: 2297 - DNA, 132 bp, Homo sapiens
  misc_feature (1)...(132): n = A,T,C or G
gggcgcttgctggagatacagactagacatcgacttgagtcagnacacgcataggacagtggctncatnangaagangggccnngcgtgcntgngtctnctctgcctgtaggntgntaataaaagaaagggg

SEQ ID NO: 2298 - DNA, 129 bp, Homo sapiens
  misc_feature (1)...(129): n = A,T,C or G
gactgagatatgtgtagcntttcacccctcatcaaagagacccctttttgcaacagcatgaagactattacagagatccacaactgtcaaaagtagagaataaatggctgagaccgtcaaaaaaaaaaa

SEQ ID NO: 2299 - DNA, 120 bp, Homo sapiens
ctgagccgaagttccaaaatgtcctgcctcatcgttgctacagacctcaggagtgctctaaagatgagtggaaacacaatgattgctaataaaataatgccaataataataacaaaaaaa

SEQ ID NO: 2300 - DNA, 125 bp, Homo sapiens
  misc_feature (1)...(125): n = A,T,C or G
gctgaggtatagcctggccagaggccatanttactncttggggaactctcagaggatcggacagggagcatgnactgatgnaannnagaggagcgacactcgngcncntttctactggaccacaa

SEQ ID NO: 2301 - DNA, 126 bp, Homo sapiens
  misc_feature (1)...(126): n = A,T,C or G
gcccattcccccttttccccttccttcaantncagggnagnttnccctggggaagaaatagttccggcccccccangcttancccaacccggggccagnantgntnaagnaaggcccccaatttgg

SEQ ID NO: 2302 - DNA, 138 bp, Homo sapiens
  misc_feature (1)...(138): n = A,T,C or G
gcaccaaggctctgaaaantgtatacnctagcaacagataaaactacngnataaactgcnggagnntctnnaaacgctgaaagangangatttggccagtctncttcagaaccaagcggncgaaaggaagagctgttg

SEQ ID NO: 2303 - DNA, 141 bp, Homo sapiens
  misc_feature (1)...(141): n = A,T,C or G
tggataacatcagcatctgatgaaggcatcngaagcacgtgaacganntctacnaggatctgagggacagggcacaatntgatcatccctcctggaggttcatgncgtggagacacaccttgccngcgagagaagggatct

SEQ ID NO: 2304 - DNA, 116 bp, Homo sapiens
  misc_feature (1)...(116): n = A,T,C or G
agatcactccatggctgaagngacagctgtcggngaagattgananngatgnttgctggcattantgggggtagccggcaatggcggcnntgccgtcttttctcagactctaagca

SEQ ID NO: 2305 - DNA, 136 bp, Homo sapiens
  misc_feature (1)...(136): n = A,T,C or G
cagcaaagtgaataagntctgtgctgccgccgcttccaccttccactccactccgggaagaaagagcgccatcatgtnnagcatcangattgacccggatgtcgagcgccggtgaatatgtcatcaagcagtctct

SEQ ID NO: 2306 - DNA, 117 bp, Homo sapiens
  misc_feature (1)...(117): n = A,T,C or G
aggatacctatctacattaggatanctactatcatnaagatgatgtgtntagttgagatgatatgtcaatgttgtctgaccccaactaaatgtgactgccatacagggagaagacag

SEQ ID NO: 2307 - DNA, 138 bp, Homo sapiens
  misc_feature (1)...(138): n = A,T,C or G
actgctcaaaggcccggacaggaagcatggnctggtttcatatatcntaccngcctcgaatctgangaanncacagcgtcgggnaccgcgggncatnggaagttnactanncttgaaggacactatcgctcttaggaa

SEQ ID NO: 2308 - DNA, 121 bp, Homo sapiens
  misc_feature (1)...(121): n = A,T,C or G
actgaggcatgacccactatgtagccttagcttggcatggaacttcttactatatagacnaggctgtctntattgtnacaganatttgcctgttntgnctcctgagtctgaaaccacagca

SEQ ID NO: 2309 - DNA, 139 bp, Homo sapiens
  misc_feature (1)...(139): n = A,T,C or G
cgtaaaactttaattccccacnaacaaagncttccattttattatggggccggancttgtggtttgttnaacaggtaatttggcnttggcctggaangnagggacnacagttttgaaagaangaagggcttattctttt

SEQ ID NO: 2310 - DNA, 105 bp, Homo sapiens
  misc_feature (1)...(105): n = A,T,C or G
gactgagctgcctgccgctgtccgtgctngctagccatgctngcccttgctnctgaacgccactgatctcggatgggnantaaaacatntgcggtgccttcacca

SEQ ID NO: 2311 - DNA, 134 bp, Homo sapiens
  misc_feature (1)...(134): n = A,T,C or G
ataacttgacattgcccanacttggctncaacccctgggtntatgcacacatgctctcnntgntattgtagagtcncttgnagcctcagtcccagaagagacttanggccanagaaccacatggccttgcgtga

SEQ ID NO: 2312 - DNA, 130 bp, Homo sapiens
  misc_feature (1)...(130): n = A,T,C or G
aactgtgcatgatcccacttcctgagaaatctccttcggtgcagcgtgngcntacagctgctatccaggtttcccagttcctgctnctccactgncccntnaccctcatgagagccacctttgcccaaaa

SEQ ID NO: 2313 - DNA, 119 bp, Homo sapiens
  misc_feature (1)...(119): n = A,T,C or G
gatggccttgttattantgaggagctgaaactttggaccnancgggtacagntangatncatctatgataatgtcgngtaaagacnggaaggattntgatagggacagagactaaaaga

SEQ ID NO: 2314 - DNA, 141 bp, Homo sapiens
  misc_feature (1)...(141): n = A,T,C or G
ggaagctctaagagagccangnctacagagccccctgtctcacattttgaaagaaagaaangaagaganaaganaaggaaagganaggaactgaaacgaagagaagagangagangagaagagaagagaagagaagagatg

SEQ ID NO: 2315 - DNA, 148 bp, Homo sapiens
  misc_feature (1)...(148): n = A,T,C or G
gaaaaagcacacagcaaaaagnnaccaccatgncctgccactatggcctgctgnccaccgntctcctntncctgctggctggnagntcggccttcctctcccatccccgnctgaagggacggctnccagagggaccgaaggaacatcc

SEQ ID NO: 2316 - DNA, 117 bp, Homo sapiens
  misc_feature (1)...(117): n = A,T,C or G
tgacccttttgcagaanaaaangggaggccacaaccaaagtncttnngnanaaagcttttacagtggacantgtancgganggaagncaaacgcttacgcttcccaaggcacagatc

SEQ ID NO: 2317 - DNA, 129 bp, Homo sapiens
  misc_feature (1)...(129): n = A,T,C or G
ttttttttattatgtagagtngtnggaggcantgctaacctggctgaaggtncattggtgaaaactgccaagaccanaagacccaggaaaantnctattaagtggagactggttagacaatgcatgtac

SEQ ID NO: 2318 - DNA, 399 bp, Homo sapiens
  misc_feature (1)...(399): n = A,T,C or G
aaaggataagtccttgtctctgggagacggggaccctgatgaatttgatgagctctttgatgctgatggtgatggtgagtcttacacagaagaggctggcagtggagaagagggcaagactgggaaaccaggaggaacgtttggccactctctttggtgangtggaggacttaacggatgatgaagttgctacatcgaaagttggaaacagtggcccccctcctgctcccagccaagagaaaaccagcgaggagctgcaagatgaattaaagaagttgcaagagcaaatgaaatccttacaggagcagctaaaagctgcatcaattaaacagcctccagggacagcacccttgcaggaaccacctggtaatgtgactgtaatttgtagcagtaatttgc

SEQ ID NO: 2319 - DNA, 293 bp, Homo sapiens
  misc_feature (1)...(293): n = A,T,C or G
acaactacctgacccgnctcaggagaatatgagattgcactcaacctggacctttctgagcggcaggtggggnctggntgcttgcnctgntgaattctcggctnccttnccagtnacccgtnactgcccccccnctttacncnctcaccncagnnaccgaagaccaccccatgggagagttatnaagaattccancgatggaaannctgaaantgatntgggagggagccccagntttccaacggtcccccnggggtacttgtcatgtgancaagaactgggacatgtggggg

SEQ ID NO: 2320 - DNA, 312 bp, Homo sapiens
ggccaagttcaaggccacctgggcacggagggcacagccagccaagacaacggtacagtcagtagccctgaggacaactccgctgactgactctgtgtggccttcatggacctgtgcccaccctgggaagctaaccatccctaatttcttcccactttctgactcctaagaggctcaagagggagttggctccatatcctgacctgcaaagggaggtaaaggcagctggggaccttgaagctctttgccctagaacatgaatcacaaccatcagcatcattaaacctccgtgtaaacagctaaaaaaaaaaa

SEQ ID NO: 2321 - DNA, 270 bp, Homo sapiens
  misc_feature (1)...(270): n = A,T,C or G
gactgaggtaacatttcacttgttgcctttccagtttcaagcaccanctcaccaacaaagattttaccgaaaaccttagggccaataaatgtgaatgttggaccccaaatgattataagcacaccgcagagaattgccaatcagnggaagtgttctagattgggaatccatatacccctgcacccgcaatggtcactcagactcacatagctgaggctgctggctgggttcccagtgatngaagccgagctagagaatttatagactctg

SEQ ID NO: 2322 - DNA, 394 bp, Homo sapiens
  misc_feature (1)...(394): n = A,T,C or G
gtactgagaaacctgatatctcaagtaaacattcaaattccactttaagaacctacgctatgccatagaccggaaagataccttcttgtgctatgaagtgactagaaaggactgcgattcacccgtctcccttcaccatggggtctttaagaacaaggacntannctagnacatcgnanntnagtngntcanaatgattacctaanatgtcatgtnnntnctgnattagatgttaganggcacagnaaaaactggnatggtaggctcataccttgaatcctagnactcaggaaatgaagtcaggcggaccagaagttcagggncatccttgtttatgtatagnttgagaccagcctgggttgcatgagatcttatctaaataaacgaacaaaca

SEQ ID NO: 2323 - DNA, 264 bp, Homo sapiens
  misc_feature (1)...(264): n = A,T,C or G
gactgaggatgctcagatctgagntctccatccatgggaaccatcttggacagagctgagcgccctaaatgtttgacatctttctgaaaaagggcaaanggtccancaccttcttccaaggaagccttggctgaggtagctgnnctgnttnttgctggttaatgctgannagctggcatacttntgcaggatgctgnggacactggcggctttggacactgcttcctgcngccgcacaagaattcncaaacaggaagaccactc

SEQ ID NO: 2324 - DNA, 342 bp, Homo sapiens
  misc_feature (1)...(342): n = A,T,C or G
ctacacaagttgctaagagaactgngaaatttttttaagaaccaaccacattggatgggtcagagagtttttgaatgaagaaaacanaggccttgatgttcttggggagtntttgncttttgcacagtatncagncactttngactttgaaagngtgnaaagtaccgnggagagnacggcggacaaatcaaagccctgnagcaggtccatcgaggacctgcacagagggagcaacctgcccttaccctgtgggcanaagngngtnccgctcttgaaaacattctgcacttccctcccgtngaaatngtaagatgctgccnnaggatccgaactgaccacctg

SEQ ID NO: 2325 - DNA, 180 bp, Homo sapiens
  misc_feature (1)...(180): n = A,T,C or G
ttggctgaagaggaaataaaactgagcaggaggtggnggagggaatggatatctntactggctccnaagatcctgtcnctacagananaacggncccganacggaagtncgccagccctccacantcctccaanggccattcgnccnaagactcatccacgagccccattaataaaaaaa

SEQ ID NO: 2326 - DNA, 133 bp, Homo sapiens
gaactgaggtgtgagctctctgcttgctgctccagtcgctgtgcttgcctgctgtggtgcctccctaccaggacagactcttgtgcttttggaaccataagccaaataaacccttccttccataaaaaaaaaa

SEQ ID NO: 2327 - DNA, 189 bp, Homo sapiens
gactgagcttggctgaagaggaaataaaaactgagcaggaggtggtggagggaatggatatctctactcgctccaaagatcctgtctctacagagaaaacggccccgaaacggaagttccccagccctccacattcctccaatggccattcgccccaagactcatccacgagccccattaaaaaaaaaa

SEQ ID NO: 2328 - DNA, 155 bp, Homo sapiens
  misc_feature (1)...(155): n = A,T,C or G
ccattgtgtgccatggcgaaccagtgagcaagactgagaaggtacctgttcttatggagnncccgttttgntggangaagatacacaaaaccccaggaaataaacgagatcatttcagatagtgngtgcgggngggaagatggaggaatatgagg

SEQ ID NO: 2329 - DNA, 380 bp, Homo sapiens
  misc_feature (1)...(380): n = A,T,C or G
acactcatacttgttttctaggacttacccggcatctccctgtccagagagcctctgtcgtttgcaagctgatgcggtgtcttcctgtggggtccctgggagctcactcacccttgcctgtctcccgtagcttacagatgctttatgcagccgttgtgtttccacctttccctgttgttggacagagagtctcgagggcagaccctgcatgtccaannntttaatccttcactaacatttcccacgtcagcccttgggaagcattggtcggactggatctgaatcagcacttgtccatttgccaaatggagttcttgtatacactgctctgaaatgagcagagtttaaaaataaagtaaaataaaaccagaaaaaaaaaa

SEQ ID NO: 2330 - DNA, 495 bp, Homo sapiens
  misc_feature (1)...(495): n = A,T,C or G
gccagatgctgtagtgtttgctggttcttcatcagtctgccttgaggaccatatgcccttgcctgatgcaggtacttcaagaagattccaaagaaacacggctttaagggtagtggggttccagtatatctaaagcgctggctacaccgtctgcatcccagctccagctcgatttctttggtggtccannacagtccacgtagcagccgccagcacagtccacgtagcagccgccagctcgagctttattgtcctgagaagcagcattgacttcattcaactcagcgattacttcctcccatttcgctgggctctcaatgaaccggtaatctgataaataactgagctcttcctttggggatcaatagcattgacttgntcctagctgctgccaataaagcagattcaccattgaaaaaggacgtcaagtcaatacttgaagcagctctggcagcaaggcaagtgaccaggacgacccttgtcccctttcggagc

SEQ ID NO: 2331 - DNA, 165 bp, Homo sapiens
  misc_feature (1)...(165): n = A,T,C or G
tactgcagcttgtagcatcgctgtgagactntgcgnccncctttacaaaacaangacgtcgtntgcgtccattcgttnnngtccatnnctgatgtgcagttaaanaacctgcctttctatgaagnccntgatgntctcatcaagcccncgaagtttaagtgaagt

SEQ ID NO: 2332 - DNA, 265 bp, Homo sapiens
  misc_feature (1)...(265): n = A,T,C or G
ggaactcttgcctggaacaaatnttgagctgcgttctcanggcanttgannngancatgttattcttttattccttttcttatttacannttnttcctnatagcctaggtcangattttaagcaagaataggggntnanaaaccatnccttganatggggtcactaacatgaccttatntntggggaaaccaaagctttacttcataaatnatttataaatntatacaacagtnttatgatnganaaaaacttttccaacaataa

SEQ ID NO: 2333 - DNA, 333 bp, Homo sapiens
gactgagtaaccagctgagaacatccctaacagacttgtgcctcctctcaaccgttctccctggtctgtaacagggatgcctgcccctggctcaacagcagacacactctgtcctgggtcacgaaacttactccacaggaaaaccttgtttgttaatcagaccacacacccttccactcttccccaagagcatgccacatctgtggtcatgcacctctcagagaaagtacaaagttgccattcatcatcgcatcaaggttggtggctggaaaggagatacttggcttcatcctgatatggcgttgtgggtttttttggttttcattttgcatg

SEQ ID NO: 2334 - DNA, 116 bp, Homo sapiens
  misc_feature (1)...(116): n = A,T,C or G
gaccctggcaccctggctgttagcatctcgcctagaacctcaagnnacctctggggcctgactgncaggcancnagtgnggggaactgctgttcanngcctgctgtttgtgacttt

SEQ ID NO: 2335 - DNA, 353 bp, Homo sapiens
  misc_feature (1)...(353): n = A,T,C or G
gactgaggatgacctggcaattntgttgcgagtncaaccacctttgtgcacccagccatgtncacagcactngaggaaggaggcaaactgcccacataccaggagaacaaaggctagaggagccagctcacanngcccacctacagcactgaggagtncactgtacacactgtgccacccatcactgcatggcctctagaagtatcaatgacacccatgccacatcgatggacctgtgatggcacagtcagcagctgcttcctcaggggtgggatacggggtcctcgtaactttcaaagtgactgaaaatttgttcactattataaaaatttaaggatttgtaaaaaaaaaaa

SEQ ID NO: 2336 - DNA, 101 bp, Homo sapiens
  misc_feature (1)...(101): n = A,T,C or G
tacacacaggcctctgagganattttaatatgttctggangctctaaanaaatgcaagagtgcctgncagtggaggtgnacgcctttaatccacctacttg

SEQ ID NO: 2337 - DNA, 139 bp, Homo sapiens
  misc_feature (1)...(139): n = A,T,C or G
gactgaggagatggcctgactgggaggagattgagaagccgcctgagagggtacagaanagaagcgagcgcgttanaagagcngaacctccaaagcctgaggttgtnaantatattcnttagcagtctatgctctgaga

SEQ ID NO: 2338 - DNA, 399 bp, Homo sapiens
  misc_feature (1)...(399): n = A,T,C or G
gactgagggagtcagtggtaggganctctcttgggcacccttccctcnttgaggtnntanggngttcccagaacncaacacnnnacctgcttnagnancctgnggaagcaacggtnccaggntttcctttgtgactgcactgngatggttgnaagnncccanctcttggcccatcgngctgngctggcctcctgcagcccattctttnagcttttctacaaggagcgngaatggnacaagagggacctggagcgtnttctcanntgagatngnnacggccccagcctttgggatgctttgggactttatgtanggtggccagcnggcccttacgggagatactgactctagaataggtgctagncactagccacgatactgcgcacattgacacgacac

SEQ ID NO: 2339 - DNA, 377 bp, Homo sapiens
  misc_feature (1)...(377): n = A,T,C or G
gactgaggtagaatatatggctgttgtttgggactggtacaagtttcctcagctgctctgtgaaggtgcacctggatgcaggtggagaagcaacatagctgaagtccagcccagtcgtcttgccggctgcagctcagccggctctttccagccatggcccaggtgggagccacagtgtgccaccccacacatntcttcccgaggctgcagaggtcccgacatccctcctctttattttcctgtttatgcacagcatgcgtaaacacatgcgttgcctggnttcagcgactccttttcggncttattgctggaccctccgagtaatactggaaaccttggattttntaaatgaatctaaaaataaactttgaggaaaa

SEQ ID NO: 2340 - DNA, 407 bp, Homo sapiens
  misc_feature (1)...(407): n = A,T,C or G
gactgaggcacaaattgtttttctggaggctgaaggtccctacagcctggatttggcgttcttgtgggctgtggtaccccagaggtcccagcagcccccgcttcagtgtcctgccttgagaagtgaggagatcaactgtttacccatctgaggaggaagatggtgcttcttgaatgacaccaccttgctggccccagggacccgtggccaggcctctgttagggaaggggccccatggggacactgaggctgcaggcccaggggggtccatctgcagctctggcggncctcacttccactgtgagctgcttgctgctctctgctgcaagctctaattgttctctgtagccggtgagtaattgagaggtctttgaagggaattaattaagntacttattgactgtaaa

SEQ ID NO: 2341 - DNA, 128 bp, Homo sapiens
  misc_feature (1)...(128): n = A,T,C or G
gactgagggtgactcatgcctgtaatctcaactctttggaanacggaggctangatggtgagttcaaggccatcctgaccaacatagggagactctcctccataactcagaatacaattaaagaaata

SEQ ID NO: 2342 - DNA, 331 bp, Homo sapiens
  misc_feature (1)...(331): n = A,T,C or G
gactgagggcaccaacccggggccagagggacgcaatgtaacagcctcacctagtctggattttattttgncttcaccctccctganancgtacgaactgacgtgaggaggtaaggataaatgtccttacttagtagttaccactgctgtgtacatctaggtcccggctctctngaggntctcttgtcatttccagcctaccctaaggtcccctgattccgtatatttattttcggggaggccggtttcatgtccttctagnttatcacatgatcagncctgtgagggacactgggtgtttccagaaattacattcacaaaaaaatcatgc

SEQ ID NO: 2343 - DNA, 182 bp, Homo sapiens
  misc_feature (1)...(182): n = A,T,C or G
gactgaggggactggtagagctgangtacgccagcttctccagcattgctgcagcancaanaggagcttgtaattttcnacggaagcccgnagacactgntnaantagcngacatacatagagccntgnagaaggcngaggatggagttncngnctctactaggaggctcttaaagtggaaa

SEQ ID NO: 2344 - DNA, 402 bp, Homo sapiens
  misc_feature (1)...(402): n = A,T,C or G
ctgagtgccccctttcaangtctcagcatcctnacgctacctcctgccgccantngcacctgggcgcccnannngntgaggactggangttatactctagggtntatnatgctgatnngnccctcaatactganctttgnnggattgtgtatatacctcttgaccangtnacaatccatgncnagggtctctagctattctgaggatggtggccacagcatgttanncttaatgaaaaatgctagngtgtggcgctatctgcatagtgcggtggacatgtccggtattactgaactccaaccananattggctcattgngtnttcttgctttagnngcctgaacganccaangcaaccatccaanacaactctttacngctnacaaactttccatatttatt

SEQ ID NO: 2345 - DNA, 213 bp, Homo sapiens
  misc_feature (1)...(213): n = A,T,C or G
gactgacctctgacctntangccagccccagttaaatgttctncttataanagntgccttgtggctgtnganacggctcaccaggtanaagcaccgacttaatncaggtagctccacacttaatcgcatcgncanttcctcnannagcctctgangncagntgctatgtcncacagaacattnnagggacccagagatcacttaatgcaggca

SEQ ID NO: 2346 - DNA, 417 bp, Homo sapiens
actgagatctgtctactttttattcaaggtggtccccagctctctcagcccttccggatccccatctcttcccactgtcgagatgacactgaaatgtgggagtctgagcagccgtgagaggtaatcaatggggaatggttccttcctggccaactgcaaggagggacatcaccaaaatccaattgtgctggcagcttcgggtcgctgggagcatcctgtcccgttagcaggtcccattagcgtttgctgagtcctgggatctatagacaagtgataactttatgtggactgagcaaatcaaggaacggaggataaattctcaacactcttggtgtgagaagcccaacatgttaatagcctgccctttggacatttactataatggttctgcattaaagtgacaaagtgttaaacaag

SEQ ID NO: 2347 - DNA, 181 bp, Homo sapiens
  misc_feature (1)...(181): n = A,T,C or G
gactgaggggtccaagtactgcnctttggntagtcanacggtgagncnctntggacngacnggctgccttnctccttctacccctcntnncccttctgctttagatttatntatatatgtgaaagcacncttgnagcnnntgtaggacacactagacgagggcaccagatctcattgtggg

SEQ ID NO: 2348 - DNA, 259 bp, Homo sapiens
  misc_feature (1)...(259): n = A,T,C or G
cctaagcgcgtggcatgactggctggagcacaccctgcgttcccaggaggttcacagatctctactggagccgctgctgaagatgcgggaatagnccagagaaaatcccgaaatgattgaaaaactaaggctcagcagactgattcctggcagcaggctgctctctcggnttgntccttttgatgnactccatccaggaaggtttttttcatcgatgctttaagggtctactcctctctgcatggcttccttttctcat

SEQ ID NO: 2349 - DNA, 178 bp, Homo sapiens
  misc_feature (1)...(178): n = A,T,C or G
gagctcttgggaaagcaagatcacatagnnggagaaacttcagctggctaggtttgctgtgagcatcgcttcgcatccacgccctgngatcgacacccgtgaggggctggnccaggtgactgcgctctgagcgatgggctgntccagcagcgccctnaacaaagcgggcgacagcagc

SEQ ID NO: 2350 - DNA, 138 bp, Homo sapiens
tatttaaaagtaacgaggggatcaaacagtgctcattcttcatgcaaaagttgcacagaagtcttacggaaatgaaaaacgatttttttgccctcctccttgtgtgtatcttatgggcagtggttggaaaaaaaaaaa

SEQ ID NO: 2351 - DNA, 242 bp, Homo sapiens
  misc_feature (1)...(242): n = A,T,C or G
ggactgagggatccacccccctcttctggccgctgagagcacaaggtttgcaggcagttcctgtacacacagntnggcaaaatactagttcntataanagtgtcagaagtctgggctgnagaggtggntcacnggttnnnancactggntgcttgcnnttagcnnagnncntgagnttancgtcacaggaacctcgataggngggctnacaacnatctgtagtggggatctgatgccctctt

SEQ ID NO: 2352 - DNA, 240 bp, Homo sapiens
  misc_feature (1)...(240): n = A,T,C or G
tgaggttgtctgtgtgagacgccgtacctctgaaactggagttccagacagctgtgagctgccatgcaggttctgagantcnaacctgggtcctgtggaagaagcactacggcttgtnttncctaaggntngntagtttctntnccagaaaccacaaggtgnncncacnaccatccgtatcaggatcangacgncntntnctggagcgnttgaaganagctacncgtgttcttacatata

SEQ ID NO: 2353 - DNA, 187 bp, Homo sapiens
  misc_feature (1)...(187): n = A,T,C or G
agactgagcttggctganngaataaaaactgagcaggaggtggtggagggaatggatatctctactcgctccaaagatcctgtctctacagagaaaacggccccgaaacggaagttccccagccctccacattcctccaatggccattcgccccaagactcatccacgagccccattaaaaaaaaaa

SEQ ID NO: 2354 - DNA, 348 bp, Homo sapiens
tgaggtctgctgcctttcctggttccctgttatctttgctgtctttgctgagttcttggcagttatatttctgtggcagcctgtgaagatgctgcctttggagagggtgttagcctctcctagaagctctcctccccaaccagaaccatctactctgcggtcaaaagatacagtacagcaggaagaacctggccagcaggaggaacccatccagcaggaaggactcattaagcaacaagaacctagccagcaggaggaatgcaggaggcaggatgaactcatccggaaagaagaacccatccagctgctggaaactaagtcagagggaagaactcagtgagaaaaaaa

SEQ ID NO: 2355 - DNA, 158 bp, Homo sapiens
  misc_feature (1)...(158): n = A,T,C or G
acaggacggacggacggactncacaanggtgcgcgtgtcggacnaggccgccangacngancgattctcacggaggaangagcacgccnacaaggcctgactgcgtacagacatgtncccctcaataaaattgcaggtngaaatgggaaaaaaaaaaa

SEQ ID NO: 2356 - DNA, 145 bp, Homo sapiens
  misc_feature (1)...(145): n = A,T,C or G
agggtaaagtgtttttatgacacanatcttcaatcangtgtaacanntngtgatgctccacatactaaactccttgtgctgttactatgncngcannaaccgtagntcatangccaanagaatttnntagaatgtattgggcttg

SEQ ID NO: 2357 - DNA, 313 bp, Homo sapiens
  misc_feature (1)...(313): n = A,T,C or G
ctggtcatcagtactcacctgcagggcctcacagcaccagctccacatccaacaccttcaccacaaactccaggcagagctggggacagaaatgaagcgacctgtgtgccggtgtcaagactccaagtcctatcccagaaacaatggagcttggagcaatgactcattcagactcccagcagccccagcgccaccttgagcgcccagatttggaaaacannttttttttgtnnaggacctgtaatttaagcaagcccagagggcctgggaggccagcanagcaccttntggtacactcgcccctggtcaaact

SEQ ID NO: 2358 - DNA, 305 bp, Homo sapiens
  misc_feature (1)...(305): n = A,T,C or G
ctggacatcttctttgtgaggggnccccgnccagcctggctactcctcagctcactgagcttcgtgangactagngnctctgaanaggttctgctcccatcttcaagaacttctggtccgactagaaccagttgatgcagactttgatcaccttgggggtgggtgtccgtgggctncaccaacaactataagcatccctcccccatcatctgntgngtntntggctggcaagccttaatcagcnccacgtggatcttatcatcatgacttctgagggcttcgatgccttctgagactcaaaataa

SEQ ID NO: 2359 - DNA, 366 bp, Homo sapiens
  misc_feature (1)...(366): n = A,T,C or G
actgaggctcctggtgcnagtgacattannntctaacaggaagcnaacatcanactganngctnagcatacacagcggacagacggcagagtgccggaggaggagtggagggaggtagctggagggcagccttcagaacacgggtggggggactgcacacagcaggaaggaggagaaaggcagggcagctggtagggcctcaggactgacagcgggcatggagctttgggcgttactgagatagcctgggctcccacacacatgggtgtncatgtgatnaaggaataaatggggcctggggaacacagcagggaggggtggcaccaagaaaacattgggcanatcagagacttggagctgcctcat

SEQ ID NO: 2360 - DNA, 355 bp, Homo sapiens
  misc_feature (1)...(355): n = A,T,C or G
gactgaggctcacctggngctcctatccggttacctacctgctcgattcttnccccaaccctgcccaggacangcatagggagatattacaaatgcggccaaagactgtgancaagataggtggatatagtgtgnaaagctcacgcagtactgtattttgctgtcccaggaggaannaaganaatgaataggactgtanctctgacgcnggtgacttacaactaataagaacttattctggacnaatnnatantgnatnttgtnttacanaaaaantgaatgcttgttgcacagacaggtattcagacnaaacactnatacacataggccatatagaaactttcaaaaaaaaaaa

SEQ ID NO: 2361 - DNA, 296 bp, Homo sapiens
  misc_feature (1)...(296): n = A,T,C or G
actgaggattgctttggctgggattaagatatgaaccaccatacccagctgcaaaagaagttttaataccatttgcagtatcagacnnggaacctanactaggcataaaccatctttggccatcaagctaggatgaacaaaggactgccatctgctctgcccttgacctatataagaaaaccaccaccaagttgtctctttgccattgccagagggggctacatgcatctttttanncctaacagcttggttttagagtgtatgtacagagaatcatcatgaattttttgttcagg

SEQ ID NO: 2362 - DNA, 264 bp, Homo sapiens
  misc_feature (1)...(264): n = A,T,C or G
tttgaccgaatagcaggcatnggtngaaccccgaaccaggaggaccaagccgctgggcatgtgactcaaggtcagngggccanatanannttgncgactnanattggganganggagatgggagcactcagtgnccttntaccttgagaagacattcttaaccnncnngtcctagggcacaanctcaagagacctgaaggagttgccaatatnnnaanntgnggctctttaaacacaaaacagngtttttcttataccatcctt

SEQ ID NO: 2363 - DNA, 261 bp, Homo sapiens
  misc_feature (1)...(261): n = A,T,C or G
aaccacaggagctcccanggactnagctatcgaacagggatgacanatggntccngctgcntacanngcagagnataggccttggcangcatcanngggaannaggngcgcttgagtcctatgaaagctngatnacatgcccnanaggttggntanattgagggaggaaaggcntggaatgcatcaanggggaggaggggcgcttggtcctatgaaagcttganagatgccccagngnaagggaattgaggggtgggaagg

SEQ ID NO: 2364 - DNA, 145 bp, Homo sapiens
ctgcctgactggagatctgatttagagaactgatacagctcttttagaatgttttttagtagttattaagagaaggctctcagaagagcaagcacagctcttacagaatttttttctggctttctgattttgaccaaaaaaaaaa

SEQ ID NO: 2365 - DNA, 370 bp, Homo sapiens
  misc_feature (1)...(370): n = A,T,C or G
actgaggagctgatggtgccgtgggagcctntattcnnagtggatggccagagacagngcttctgagctttgataggattcactgtggngntcatccncagggaagagggtctcctaanagtnaccctgnncagaccttgtcagagcctgganaanagctatgctctcnagccagggtgtctatggnnaagtagagtnaggacttncttatacctncagntngaccaagcnaaacacaaaccctgncctgnnggactgaaggagcatattacnggtgtactctgccaagtcatggactgcggaggagacatggtagngctttaagtaaagactagaacggnttccagcccagtggctcgaagcactttta

SEQ ID NO: 2366 - DNA, 150 bp, Homo sapiens
  misc_feature (1)...(150): n = A,T,C or G
cttgcttttttatgctncagntcactgtctatgttcggaccgacagtctnaatgcctggntctcactggtatttgtaccaaaatacactcacaatgttgnacagngcttttgaacaccaaagaaggcntcaggaatcctttgaagttcgg

SEQ ID NO: 2367 - DNA, 126 bp, Homo sapiens
  misc_feature (1)...(126): n = A,T,C or G
gactgaggttttctctggctatcctggactcactttganaacgaggctgtccttgaactcacagagatctgcctacctctatctcccaagtgatggaattaaaggcatgcaccaccaaaaaaaaaa

SEQ ID NO: 2368 - DNA, 284 bp, Homo sapiens
actgagaccagtttaagaacaccttggttggggctggagacatgacttggcaattaagaacatgagctcttccagaggtcctgagttcagctcatgcagaaaagttccaatactaaaatgaacactcctttctgcctctttgtgcccctgccctgtctatgtagccagccttggctgtcctagaactattagaccaggctggccttgaactcacagagacccacctgcctctgcctcccaagtggattaaaaatgtgttactgggagtgggtgggtaggggagt

SEQ ID NO: 2369 - DNA, 271 bp, Homo sapiens
tgaggtggggtctttcaccgggatccatcttcagccgcgggtgactgggcagcatccttacttagctctgaaagtcgcatcctagggcagaccactctccctctcccatccacacaaccagacactcacatcaggtcgcatactggcttcacagcagtttgagaagaaggaaggaaggaatcgatcataatttcaaatctcttgaaatgttactctcctttatgatatttagaaatgtatactttgtggtttgtactgaattaaaaaaaaa

SEQ ID NO: 2370 - DNA, 150 bp, Homo sapiens
  misc_feature (1)...(150): n = A,T,C or G
cttcaggcactagtacagataaggatgcactggacctatgatnnatgtgcatagtgaactngantcganaagaatgggctttgnttggatcctncacagaagcgtcttctactaagatgtgatgctggagacctactccgcataattaat

SEQ ID NO: 2371 - DNA, 157 bp, Homo sapiens
  misc_feature (1)...(157): n = A,T,C or G
tttttttttttctttgaagagggctcngcaatggtgttgccnagtaaggaagctggatctgannggaactgggcnaggaggaattgaatatgatcaaaatacattgtataatagtgtcaaagaattaataaacatttttaaaggggaaaaaaaaaaa

SEQ ID NO: 2372 - DNA, 175 bp, Homo sapiens
agagtcctgttggaagtatcagtgagttggctagatgaaggggacctgcattcagggatcttcaaaagacaaagacaccaccacagtgttaaaatggttgaggctgtgaaaataaattagcaataaaaataatactcagatgggacattccatgtgccaactgatcgcctaaaaa

SEQ ID NO: 2373 - DNA, 168 bp, Homo sapiens
  misc_feature (1)...(168): n = A,T,C or G
gagactgaggtgactgaggatatcaactagntagcacacctacagactccgcccttccccagggcctgagtgaacagaagctgggatgatggaggacggnctactggctgatgggaaaggcaaagaatcactgagcttggaccaagagatccttggaaagctgggctt

SEQ ID NO: 2374 - DNA, 134 bp, Homo sapiens
  misc_feature (1)...(134): n = A,T,C or G
gatgatgacttacatgcttacggaggctcnanngaagancccttgtgattcangtccgtncttctgtggncttnaccatgggnagtcncaaggctaccaanggtcttcatactatcacttttctctaaaggaga

SEQ ID NO: 2375 - DNA, 244 bp, Homo sapiens
actgagataaagcttcagtatggaaaagccccctctgccacagagacgaggaaatgggcagaattggtgtgcaaaggaactgaattggtgtgtaaaggaactgtgggagtccagaaattgttggtcccttcagggctgttctgagtgtcattgtgcagctttctgattggaggttctctcgtgtgatacaagtgacataaggttgatttcttttattaagagaatacttctagagaaaaaaaaa

SEQ ID NO: 2376 - DNA, 199 bp, Homo sapiens
  misc_feature (1)...(199): n = A,T,C or G
taagaggctatcaagtaggctgaaagaatattttcagaagcatagactcttcggaggatactgcagttcatgagatntcaaggagagangtcaccactcctaccttcgcgctttcaagcatagcatagaactatgtcattgtccgaggttatgattgctaaagtgtaactgggaaatcaaaaacgttcttacttaaaaa

SEQ ID NO: 2377 - DNA, 219 bp, Homo sapiens
  misc_feature (1)...(219): n = A,T,C or G
tgtaaggaagaagcctngcctataaggtctggagagntancaccgattcctgnnctggggctgagactgngctcacnnanctgaatctaaaggcttaggagggcaaaccaacatgtaaacctgctggggnnctaatctnacaatgcggagggtncagacnnaantgttggattnttcnaangcangcctangaaagaagataacatgacccgagctgtt

SEQ ID NO: 2378 - DNA, 256 bp, Homo sapiens
  misc_feature (1)...(256): n = A,T,C or G
gactgagggttctcgggctgttaacatttcttgccaatttctcctgagatggtgtcttcatgctgccaagaagagaacacagaattctatctcanccncaggaggacaccangacagcgccttcccntgacccagcancnccaccaggctgtaactgtctcttgctctctcagatgaacngctgcttctgtggcctctgaacaaaagcaacagcttcacactctacataccataaatgtcaccaccctaaagtgaa

SEQ ID NO: 2379 - DNA, 120 bp, Homo sapiens
aggctctgcctcccaagtgcacctacaagcctagtcctagttcatattctatgtattagaaaatgtccttgtccctaggaagtaagcattaaagaagtattcagtgtcaaagaaaaaaaa

SEQ ID NO: 2380 - DNA, 220 bp, Homo sapiens
  misc_feature (1)...(220): n = A,T,C or G
aacgcccttctcgcaaanctgagccgagagtgttgagtgactanaaagtaagcagcccggntttnaaagctgcggacgctggagcgcatttccaaggcttgtctgctgtaaggatggcaccgtcctcctcttagatctgtctcaagagaattgtatgttttactttataaaacatacagtatgtcaaaaaggcaaatngnncccccaaacaaaagcttat

SEQ ID NO: 2381 - DNA, 132 bp, Homo sapiens
  misc_feature (1)...(132): n = A,T,C or G
cgaggttctcaacaggtgatgctgtggnccctcatttttttctccgctcccctagngctggatggaggacnccttanagtgaaatgananaccaggagaataacaacaacatttcacgtaacccctttgctg

SEQ ID NO: 2382 - DNA, 300 bp, Homo sapiens
  misc_feature (1)...(300): n = A,T,C or G
aactcagatctgccccctgcctccgtctccaanagctggttgggcatngaangtgagnccanncangcncaggngcnntgattntangcgcgaggttttgcttaaatncnagcaggttgggggnttactatatacatggaatcttatgaggcacctgcaaaccttntcatgagtcatttgttgttcagcaagggaatctgacaatacaggaaggtgttcgtggtaagccttaccaggccagatggggtnatgagattcttctgctccagactaatagaagaaccctcatttcaagatgaa

SEQ ID NO: 2383 - DNA, 257 bp, Homo sapiens
gactgaggaaagtggtctacttctgtgcttcaccctcagtccacattttcaagggctccacgtaaccggtggttactgcgatggatagcatgtgcctatgggaccctgaagtttatggcctcaacacagcgcttcttgtacagaccttgtctagtgaatgaggatgctcacctgagttactccagagaaggctgcagagtcccccagggcagtgatccttagtattcctccatgaacatagtctgtttcatccctca

SEQ ID NO: 2384 - DNA, 240 bp, Homo sapiens
  misc_feature (1)...(240): n = A,T,C or G
gactgagatctcgctgcctnagggagcactacangcaaaggngccgatgaacncagacacgcctntnaggcgcatgagccagnanccactattctgcttctcaaactgttctcttcagtgtttgtcacactgacagacagctcacaaccctcatgaaggagtttgagccacaggacccccggcctcagactcagaaactatgtgaggtatgttttaagttgctaaatttgaaattcgggg

SEQ ID NO: 2385 - DNA, 336 bp, Homo sapiens
gaactgagagctacaagctggtggaagagccggcgggcggctcggagctccttagctaccacaagctccacacttgtcgtgcttagcttcactcgacccgccacacctcgaaagaccagggaacaggtccgccaactgtgcagagcggacgttgcaatcctggggaggaggccggcgcctacacacagccataaccggagcaactggaaatgacagaaagcctagtgtttcccggaggcaccgcccagtcacttccggttccgtaagcctattgttcccgccctcagcctacactttcaacaaaacttcgggttctggtagctccaaaaaaaaaaa

SEQ ID NO: 2386 - DNA, 172 bp, Homo sapiens
cagctctgacccctgactcattgttggaaacctcttcctgcccggctctgcatccatgcaacagggaccggaaacctgctctcccctgtctcctgggactgttgggggatgagtcaaataacgggcggggaaagctagagaagttgaaagaggttccttaccaaaaaaaaaa

SEQ ID NO: 2387 - DNA, 294 bp, Homo sapiens
  misc_feature (1)...(294): n = A,T,C or G
gactgaggatgctccggtgagctgctgcacanggaaggagncagaccctctatttaagacaacanagacttccggtctcacctgaactgcaatctgaagtgttcatcagctctaccactgctccagtctgtctccagattgcttacctaacacactccagaactgattacgcatgctactgttcttctgcacgtgtgttatatatatcattgnttcttctacatgattgcaatcccctgtctgaaaccatgccaagtgcagaagcaatgcctggaaaatctttttgaaatggaa

SEQ ID NO: 2388 - DNA, 180 bp, Homo sapiens
agactgagcccagtgaccgcatgtgaagaaaactcctaccgatgggcagagacacatcaacattaggataaaagaccggccatggaagccatgggctgctgcttgctagcctggctcttggtgtcgcttatttttaagtgagtccagttgtgtgacattcacattattctcttcaaacat

SEQ ID NO: 2389 - DNA, 341 bp, Homo sapiens
  misc_feature (1)...(341): n = A,T,C or G
aactgagggactcatgncacctagtaataacaantgcangtncagcttcagantttcagccaacccttttacacttccagtactagaganaaggaacaagcngtcacttgcgtgcatgcatcatgatgccgnncttcacagctagtaaaacgctgctgacaagctttcagaanacactcagnaccccagcnctacaggggaaagaaacgtnaaggtctcctcatgnagcctgctctcgcctcgagtttataggcctactacattttttacctttgtaatgtttaacctctgtaatccaaagccccttaattaaaaactgtcagtgaatctggcagcacatg

SEQ ID NO: 2390 - DNA, 132 bp, Homo sapiens
  misc_feature (1)...(132): n = A,T,C or G
aaatactgctcagtcggcnctnnctcgagaacattctgattgatggagagacannctnggactttgacctctccagtgctgccaccaagcaagagtctccttcatttgtaatttgtggttattttgtttctg

SEQ ID NO: 2391 - DNA, 113 bp, Homo sapiens
  misc_feature (1)...(113): n = A,T,C or G
tagatcttgtggaatgaaancttnagctgtcctcgtcgnnnttacnctagnngtggagcatggcggctggattagtattaataaatatattttcttcttcggaaaaaaaaaaa

SEQ ID NO: 2392 - DNA, 123 bp, Homo sapiens
  misc_feature (1)...(123): n = A,T,C or G
ggctatgggtgtcccaggtactgacaggaccacaccattggtgnctttantaancttgctgnnggctgncgagatggctcanngnttaggcagcntcaactgctttnccgaaggtccccgacg

SEQ ID NO: 2393 - DNA, 287 bp, Homo sapiens
  misc_feature (1)...(287): n = A,T,C or G
actttgcccacttagcgtcctggtatagcncaangatccttncnnnangacnnccgnacctntttccgactactacangacacacccnttccaccttgctcctggngctgcaantgcacggnggcgctattgagccctccctgtgtcagctngcccagaagtacaagtgacaagatgatctgctgcgagtactacacatgcctgcaccctcgtgtattcgactgcagcaagaaatggggccataccaataacctgcgcccccaaaacaaggtcaaataaagctgagg

SEQ ID NO: 2394 - DNA, 130 bp, Homo sapiens
  misc_feature (1)...(130): n = A,T,C or G
gagactgagcctcacgttggtacccaagatgctcagtgctctggaagaagagatggcgtgacaccccccccccaacaccaccaagcatttgtttgntaaggatgcccaggtcacctgggtgctcaaataa

SEQ ID NO: 2395 - DNA, 104 bp, Homo sapiens
  misc_feature (1)...(104): n = A,T,C or G
agactgagctgggagtnttgtcctggtgctatnctggaagcatgcgcccaagacctgcaggaagggtgttaatacctatgtaatacatagaaacttccagaata

SEQ ID NO: 2396 - DNA, 395 bp, Homo sapiens
  misc_feature (1)...(395): n = A,T,C or G
gaactgagatcagccgtcctctcgctggccctgaggggagccaagaccttgtctggcaacatcgactgccacgtcttccccttctcccactncggcaagagcttcatcaaatgctgtcatgtctcttcagacagcttcatccagttggtcctgcagctggcccacttccgggacaggggtcaattctgcctgacttatgagncagncatgacccgactgntcctggaaggcagnacagagacagtgaggtcttgcaccagaaaagcctgccagtttgngagagccatggacaacaaggagacagacnagcattggcttgccctggnncgagngggccgggacaagcaccangctntactgaaggngganangaannggccaggggaatgacccgt

SEQ ID NO: 2397 - DNA, 198 bp, Homo sapiens
  misc_feature (1)...(198): n = A,T,C or G
ctgagactgagttatttgtgatggtatatagctatcctccanagcctgggaggtggaagtcgncggaacacgagttcaaggtcatcctgtgctgtctaacaaaccgagggaggcctgcagttcagtcaatcagcctctctccctctcaaaaaaatcaataaacggggccagcaagatggctcagtagataaaaaaaaa

SEQ ID NO: 2398 - DNA, 179 bp, Homo sapiens
  misc_feature (1)...(179): n = A,T,C or G
agactgagctggagaannctctgattaccaagcagatggattctaacgncatngtcttcactctacagatgagtaactcgagcttcaaagatgaaaaaagaaaattttctaaggacccaggtcttgtatttgcttcagctctatgacttcattaaattctcccagcatctctcaaaaaa

SEQ ID NO: 2399 - DNA, 140 bp, Homo sapiens
gctggctggaagctcttctccttcctcccaggaaactggaaaatgctgtctgtctttggtggacacaagaagagggctgtcgtccgggtttccttgtgagccacaataaagttgattaattggcagtgacaaaaaaaaaa

SEQ ID NO: 2400 - DNA, 293 bp, Homo sapiens
gactgagactgggcaattccaggcaattccaggccttagaagccacccggccggaggcaaggacaatgagtcagcactgtttccagacctcccaaacaagtttccagcccccacacccggtaatggaatgtccatagagatggacccaacagattaacagtgaggtcatctcatgtgccttaaatcaggtctgcaagctcacttgggggggtctatcttagtaatggggagaccccagcatgttgaacttctgcagaataaaaccctctttgcatttacatactaaaaaaaaa

SEQ ID NO: 2401 - DNA, 133 bp, Homo sapiens
  misc_feature (1)...(133): n = A,T,C or G
atgtctcctgcccacatcctgantggcttcnttaaggtganccactcctctcttcactgnagagtnntggaancctggnttccacagtncgtnancangagcctacatntgcgtctcctccagccatcggagc

SEQ ID NO: 2402 - DNA, 118 bp, Homo sapiens
  misc_feature (1)...(118): n = A,T,C or G
caggacagcagggtggtntgnaaaggtgcctctcncctngagngactgtgtcctacannggatctcatcatcgcangncctnatctctagcatatcgcangccatctcatgcccggag

SEQ ID NO: 2403 - DNA, 135 bp, Homo sapiens
  misc_feature (1)...(135): n = A,T,C or G
gaactgagactcttgcaccancaggttggtaagcactacantcccancacaggagatggtgcaagtccagagggattcanggtcatcctgagccgcangcaatttcaaggccancntgtctcagaaaaagaaaaa

SEQ ID NO: 2404 - DNA, 205 bp, Homo sapiens
  misc_feature (1)...(205): n = A,T,C or G
actgagaacattgcactcagagagaggacgttgactagtangatgatggctcagcaaggcgaggtgcctatttncaagcctgacaaccggagttcaatccccatgacccatgtggtaaagagagaacctctcacctctgtgcatgtgctccatgcacgtcaatgcttanacgttaaatattaaagacttcggtgaataattacaa

SEQ ID NO: 2405 - DNA, 134 bp, Homo sapiens
  misc_feature (1)...(134): n = A,T,C or G
cagaggaaatacaaacgatgtncattcactnggatagcacatgcgtggaccaagcnccagggctttggttgnnggncgccatgactcttggnatnganctactncatgtatnaggaactctgggccagccctaa

SEQ ID NO: 2406 - DNA, 172 bp, Homo sapiens
gagactgaggtggggtctttcctgacttcgcttctgacctctgtgagcaccaagaatttacgcggcacagggaagcgctctagaagcaccctcgggcttgtggtctttgactttggacccaatcacaatcaccttattaaaataaaacatatataaaccattaaaaaaaaaa

SEQ ID NO: 2407 - DNA, 265 bp, Homo sapiens
  misc_feature (1)...(265): n = A,T,C or G
cttgtcgttagcttcanccanatagagaaaccctatcttactctccccagancnctaacaagaacactaaaaggagcaatggactcanaaggacacgtnttgtgtgttctctcttaatctgagtgtggantgtgtggaagtgaggnacaagctggatactgncaacaggcanccntaaangtgtcnnaggggggcctngcctctacacttgctggctctnctcccccatgagantgggctttcggtaagccatgaacccatcatt

SEQ ID NO: 2408 - DNA, 268 bp, Homo sapiens
  misc_feature (1)...(268): n = A,T,C or G
actgagagccgagaggctgcagagccaagtatggctctnagnggaaagtnnttgtctnctacggggggaaccacttnctgaggctgcttcagttnccagcctncgcctttgggattccggtgtacactgaagaccaactganacatccagnctnacanactgaacagngtcctggattcctgnactttncannaggaggcngccantgttgnactaactggaccatantctgnacactactctaagaaatccctctctctacgataaa

SEQ ID NO: 2409 - DNA, 257 bp, Homo sapiens
tctctcacttccctgagcctgtcattgaacactgcgcctggcctgaggagggcttccaaggttgatgagcgatgctgtgcactttcctgtcacaccctcaccggtgaacactccatgcttaagaattacctgtttgatgtactcgtgatactgggaatccaacccagggcctggtgcacagctagacaagcactgttgctgggctctaatccaagcttagcttagaaaatacgcgggggtgggtgggtaagggggac

SEQ ID NO: 2410 - DNA, 210 bp, Homo sapiens
  misc_feature (1)...(210): n = A,T,C or G
agactgagaatggaggaagagcatttggccatcatctccaagcctgcatgtgtttatgtgtttatacctgcgncccagcccttgagcttttganactccaggggaaaactttgggtggggacgctgcaggatctacatgcggatntcttctgtacatggatagnacgggtgatggtctgcgtacctgncataagatccctgaaggagtaa

SEQ ID NO: 2411 - DNA, 109 bp, Homo sapiens
  misc_feature (1)...(109): n = A,T,C or G
gttggtgctcggaagctgcancactgcgntctattttgactttcancagtggcttantgtctctgcccaggtgacaagtgactgtattaaaagcaaagcctgcctcctt

SEQ ID NO: 2412 - DNA, 480 bp, Homo sapiens
  misc_feature (1)...(480): n = A,T,C or G
gaggggaagcttgccaaacagctatgcagagttgtgttggatcantttgacaaacantattcgaaagaacttgggnattcctggagtncantaaggtcagtatggttcntctcttgntattttgtgagaggaaagggaagtatgtagcnaatacctccttgagagtggcacagtccangagggaggaggtgactgtacattttatgtgtgaaggaannacctggcatgtaaaaatgnggggcagatagnaatgccctctcaagcacttggcttttatctagaaaatggggaggcnccacattttaaaacancgctgtaataaaaatcctaacttggaaganatttaacttantgaaattcaggtaatacccaagnccttaaanggccagnggttcctcttatcttagcntaaagtcagggctttatttgnccntttattggnccccatgcccncctgcatggggagcacattgtgcccat

SEQ ID NO: 2413 - DNA, 294 bp, Homo sapiens
  misc_feature (1)...(294): n = A,T,C or G
gactgaggacgagtggatgcgactctcagcatccctgaaccatagtcctttgaggatacaggaagacatctgaaatctcaagatcaaaatacgagaaggagaagtctgagagcaaatgaggtgtcatctatggagaccttctttgtaaaacaacaacaacaataacaaatgacaggctctctggggataatagatagcttgcttgtgcatggggcacagatacttaccaattccacntaactttgccttttaaaatgtctgtatggcacactanactacatgatcaggagaaag

SEQ ID NO: 2414 - DNA, 520 bp, Homo sapiens
  misc_feature (1)...(520): n = A,T,C or G
aactgaggaaagcagncgtgaaggaattaggcaagggatatcggtgttttgtttccacgtgcacgactttgaagcagaccccacatccctgttactgacattcttcaagacaaaagaaaacatgtctgtctgtgtttaaagtctgaggaccagaagcaaagcattgatgtttggtgctcgcccttctacccctcagcagtggcaacggtgctaacctcaccctttcgtcctcctgtgtcccagatcgggactaaaggaaagcttggctcttggatggcgtgtgtgacctcagcctcctgcaagtagcaggattggcgcagtcctgggctgcatgccaagccccgtgccactacggggatctcacattagggaactctcctgcgaggtgggcgcacactacaaagggtgtttctcaccgagcctaagaaatgcccacgcaggttcgcctaacctcattggctccgtcttgtgctgaggaagatgtgatttgngctacatataaccaagttaggaagattac

SEQ ID NO: 2415 - DNA, 120 bp, Homo sapiens
  misc_feature (1)...(120): n = A,T,C or G
caatgtcctttaaaaccaagcagtngctggattttgatnagacatggaacantactcctaactacaatcaangctgttgttattgntngaatatgtggagcgagcaacatggaatgaccg

SEQ ID NO: 2416 - DNA, 233 bp, Homo sapiens
  misc_feature (1)...(233): n = A,T,C or G
gacgagagcctcctgatnanatcctactgnttgagagcattcatactcccacnggctccangnacgnnntnatcgccntactacgaaggnganctgcncttcccatgnggtgcatggngantaaccttgacctatgacatcaggtcttctcctcttgtgtgtctctcgtccttctgatctctgacaaggacatgggtcattgaattaagacgctacactaatcagtgatctat

SEQ ID NO: 2417 - DNA, 123 bp, Homo sapiens
  misc_feature (1)...(123): n = A,T,C or G
acaggcaatctaccatagagcatncaactatcctaagatgcattcnnccaaccaaccaaagaagcaanngactganctgaggaacaaccaaccaaccaattaaccaaccaactgaccgaccaa

SEQ ID NO: 2418 - DNA, 417 bp, Homo sapiens
  misc_feature (1)...(417): n = A,T,C or G
ctccttccgaagacaatctgtactctggnatcatctggtggcatgcanntgaccaaaacttccatacncagcttgntcttatgaangtagtgcatcctgnacaccatcgcaccatactgganacttgatccccangaaancccctgttcacggcctggatcagaanagaaaagaacaagctgangatcntgagtaacacagagttgaataaatgatgttgtatcaacaaggnggcctgnannaagggtncnggtggnggtncccactanngcctgcggatagcancccacctgcacaacagggaacctggacagggtggggaaggcncaagttnncacagcagngctcangccctcatggctggggggctgncaccaagagctggntggaagggacccanaggctgaggggaagggg

SEQ ID NO: 2419 - DNA, 140 bp, Homo sapiens
  misc_feature (1)...(140): n = A,T,C or G
gagactgaggtttaacaggaaganaccatgggcaggctcctcaaagctagtgagtggtangcnattcntctcctgntgnaatgtgtcacttcaaaccagatnanaatatattaanggcaggtctgttgccaaaaaaaaaa

SEQ ID NO: 2420 - DNA, 237 bp, Homo sapiens
  misc_feature (1)...(237): n = A,T,C or G
gagactgaggaaggtnccgtcggcacaccagccagctcgngaggacttannatgattctccattactgacngaataaaatgaagtccccatctctcttcaaaacagngaagcngnacctacttctctgagtacacngactgagactattttcatgantaaagaaaancattnaccaggtctnaataaatggaggggcaacnatangctttgggccttgatcagaacacaaaagatta

SEQ ID NO: 2421 - DNA, 262 bp, Homo sapiens
  misc_feature (1)...(262): n = A,T,C or G
tacaggggttccagganagccaganaaaccctgncttggaanacanacaancatcatcagagaacagnnnannagncgctgtgtcngntatcatgggcacctgagatttgctgcttgtcccctgataaaggtctgaaacatgggatttacagtggngtcagtttgcatggactgagcaagcctagccaaccagtatgtgtccttttatatttctgantatttgtaaagtttttaagncatgtaaatctatattttaatctca

SEQ ID NO: 2422 - DNA, 216 bp, Homo sapiens
  misc_feature (1)...(216): n = A,T,C or G
tttttctttttttttntgttgagctgctccacaccaagctgtctgtttttatggagtgcctggagggcgactgcctctgcgtgggctgctcttaggcctgctcagctggccccanagacaagggtggactcactcagggctcccccttccagagggagggcgtgacttctggggcctggccccactcttaaccttggctctagactgttactccca

SEQ ID NO: 2423 - DNA, 355 bp, Homo sapiens
  misc_feature (1)...(355): n = A,T,C or G
tttccaggtgcttttctgatgccaaattgaaatccaagatgaggtctagaggtgtgataaagcagcagccaacgaaaccgtgggagaaccatactggaggtctgagatgcgcaattcagtctactgctaacggaagaaaagagcagggtggaccgattaagctgtgcagcacatacagagaanaaaggctggctgtgttccgaggaaccttattatctcaataaactctgtaactttcagaggttctaaatcatacggttgattctgccaatctcctagcacaacacaatgtgtcaggaagaattggtctcatttgccaaggaccatccaatgaagactgggagaatccactgta

SEQ ID NO: 2424 - DNA, 426 bp, Homo sapiens
  misc_feature (1)...(426): n = A,T,C or G
gagaccttacatcacactggagtgtgatgatccgggaggatgattgcctgagacctggaaccttacgacttgacattgaggcgtacagcatcgccccccagtccaactgttcctcctcccaggtccagctcagcgtgctgacttccttatgaggtcctcccagaccccaactgtgagccaagccggatgacagtgccactcaatgtgtgagactgcatgaccaacacttgacaagaaacacccccatccagcttgccaggcctgtcacatcgcatcctcagtcaggaagaagacagaaaggggctggtgtttgccttgttttctcctttttatttggnctcgntcctgncccttgggtggtgctgatagcattcaggctgngccagttctccccagtaaaaccttcttttgagatgccccaacaga

SEQ ID NO: 2425 - DNA, 434 bp, Homo sapiens
ctgagatgaacccccaaagaagaacaaaggtgaccccatgaacaacctggaacatttttaccgcgagactataatgaaaaagccgtcttgaagagttccaacttttgagaggtgaatcctttgcttgccactcactggtctcagctgcatccgtgagtggtagtggcacagctgagaagccatcactcctccagcacaagggaaaacaggcagcacagggtaaaggccccaggctccatgtggcaaagcttattgattttccaactgagcaatattggattgggcctaagacgctgaagcaaccaatagaatttatcccagaagatgagatccagagaaatcgtttgtcagaggaggagatccgaaacattcctatgttttcttcatataatccaggggaaccaaacaaggtataggccacatcaaaaaaaaaa

SEQ ID NO: 2426 - DNA, 161 bp, Homo sapiens
  misc_feature (1)...(161): n = A,T,C or G
gagactgaggaggcctcantgctcccntagctccccactgggctnnactgnacngccatnaggacccatgaatntcctgcctcaacctcngaactggatnataggggctcactgctgcacctgactttttcacatgactgcttgggaatcgaacccaaaaa

SEQ ID NO: 2427 - DNA, 153 bp, Homo sapiens
  misc_feature (1)...(153): n = A,T,C or G
gagactgagcagcttgcaccgcncagctgtgctggtgaactgtctgttcananaaggatgcgttttgannaccaatggantttacctgtggaaccaancatctgcancantgtntnntncggaagtccacangattgattctgctcaaacaga

SEQ ID NO: 2428 - DNA, 154 bp, Homo sapiens
  misc_feature (1)...(154): n = A,T,C or G
gagactgagggttggcccaggncctcctatgacctcaatttccacagaagacaaggcagccactctgggtttcgtagggcggaaccattgagccttcttggagtaaagcgtcggaaacacaaacaccccagcaccgagcacggaaaaaaaaaaa

SEQ ID NO: 2429 - DNA, 283 bp, Homo sapiens
aactgagagctgccagagaaggatcaggaagttcaaggtcatcctgcgatacagagattctgagaacatcccgggctagaagacattctgtttcaaaatcatgaatttcctttttaaatcactctgcctgtgcaaaccaggatgatcttgaatttctgatcctccaatctcagactctgtactcaggggatgtactaccatacctggcattagtatttctctttatcctgatccaattttcccaatgctacctattaaactgttcaatccccaaaaaaaaaaa

SEQ ID NO: 2430 - DNA, 376 bp, Homo sapiens
  misc_feature (1)...(376): n = A,T,C or G
cctggggttggccttccagggcgctatcaagtactttcccntncaagtccctacggcagctggagatgtgangaagaccaanctnnatgngcttncctcctctgtcctgngngacaccacagccctctacacctgtctgctgtgtattacagtcacaccaagctgtgtntcggntaatagtctgtctccctatggnctgcatatggaccccgtnntctgctctttagggacagagccttgagctttcttcagagctgcggagtctccaggagctcttgtcagcctgtggtggggatctctgctctgccctcccctggctagccttgctttctgccgacttcagctacaatgcgctcaggagcttagaaaaaaaaaa

SEQ ID NO: 2431 - DNA, 158 bp, Homo sapiens
agggtctactgtgtagccctgtctggtcagaacttgctgtatagacaaggataaccttgaactcacagagctccatctgcctgttggtatttaaggcatgtgccactatgcctggatgtatctcagcattactatggtgtcacactcaaaaaaaaaaa

SEQ ID NO: 2432 - DNA, 169 bp, Homo sapiens
  misc_feature (1)...(169): n = A,T,C or G
ctctgtggccatcatggaggtggtggaggtggagagtcccctaaatcccagctgtatgattttgactcttnagaccttccatnnantngntgggttngtncatcangtacntngncgtacattganattcctcatgntcccatngctgcangtcttgccaccagtgaat

SEQ ID NO: 2433 - DNA, 258 bp, Homo sapiens
  misc_feature (1)...(258): n = A,T,C or G
gaagatggcatttgcattcattgnntcnttctntgtatatcatttgcagcaacatgtatgaggnacttcctgagtacngagcactctgcngaactctgnngacagaagactttnggaatgnnaaatcccatgaggtcccctcctccanagacaagcaatgaagctaggatctagatttcttnacgatnggtctgtnccaacattgnctgngaatngantgnttttctgnnctgggatngtgggtataactgatagcat

SEQ ID NO: 2434 - DNA, 225 bp, Homo sapiens
gactgaggtcgagctgaaccccaatctgtcatttgaagaagcctgcaaacagactggactccatcagcagcacttacggcgggctgggaaggtaggggtgggggacagtgcaaagactccatcctcccatttatgggtatattcatcctgagctttgcagcagctcatttgtaacctgctcactttcgggctagtaaagctccctgcccacctcaaaaaaaaaaa

SEQ ID NO: 2435 - DNA, 367 bp, Homo sapiens
aactgaggtttgttgcgattcatccaagatgatgcacaagaaagctcctttgggatctgtatgtcacactatcaatacaacgcttacattaatcacttccagttaagggccaagaccagcgacatccatttgaaggccagcactgccccctggtggaaatagcgggcaggggcaagtatagccaccaactgatggtcaaagaacgtatttatttaaacatgtgcttcttatgaggagtttttattgtgtggataccattatattattaactgggaaataatgttcacaaattatatatttcatataatgtattgtcttgaaatatgtatatttgtgaaatgactaaattaaactgacatatcacata

SEQ ID NO: 2436 - DNA, 440 bp, Homo sapiens
  misc_feature (1)...(440): n = A,T,C or G
actgaggatgtccgtggattggacttgcctcagactgtgtagccgtggttggccttaaattcttggtcctctgcctccacctggtcaaatgatggctggccttcaactctggatcctactgctccagcctcctgggactgagactacaaccctatgccaggcctgctggaatcaagtttttctcagggggaaattatacatactctgattgggaaaagtcatcacatttagaattgagcacgttcttgagctcatataatgtgttcaaaacaatggcagaggtctaggggagatggctcagttggatagaagccagcctgaagtcataagttagattcccacaaccctcatcatggaaggagaagtcccaacccctgtgctgtggcatcccctcccacgcacatctacataaatgagcangtgtaatgataaaaaaaaaa

SEQ ID NO: 2437 - DNA, 285 bp, Homo sapiens
  misc_feature (1)...(285): n = A,T,C or G
gactgaggaatatcacagcccatctggaagatccatcagttctaacggggctgggcctgcctccaggatgtgggagattggctccagagctgacacagggctgcttccccccccccgcccccccaggatggagctntggagggaaattctgaattgttttnttttggggacagtcaggtgggggtgggganaggaanattgnnccatttatcttntatagacatttnnttttntcccagcantggggagccacatnacccaaatntccaattatgaacaccacag

SEQ ID NO: 2438 - DNA, 376 bp, Homo sapiens
  misc_feature (1)...(376): n = A,T,C or G
atccagtgaagcgtgggcngctngggangtaactgagaggtagagtgcctgtgagcatgtgtgaagccctgggttccatnatnagcatnaccacantacgtaaacacatgaggacactggacacacaggacggaaggctcangaactgaatctccagatnttcagcccttctccctcctcctggaatgtgtttaaacanaatcacttattttccaaatttccttagtgtagtaccaatcccacctcccttaaaacagctctcatatgtgatcatgtctaagaaaactttgaaattataatgtattttgtagccattgtattataagtgtataaatagaaaattcagtctcctgacttgtcattgcaaaaaaaaaaa

SEQ ID NO: 2439 - DNA, 124 bp, Homo sapiens
  misc_feature (1)...(124): n = A,T,C or G
tcggagatgctgcagncgcctcttatgggactcggggaggaagatgaggcggaccttacagattggaacttgcctttggcttttatgaagaaaagacattgtgagaaaatcaaaggctccaaat

SEQ ID NO: 2440 - DNA, 208 bp, Homo sapiens
  misc_feature (1)...(208): n = A,T,C or G
ggaaacagctacaaaccactggaanaggctgctgcatcancccntgcannanantactcagnaatagagganangagcatcatntgcccctgnngaacnctgnttggatncaaacnagagtatcctgtgtcccacacccatctcgntgcgctgnatcattgcttttgtaaaaacacgtatagaataaagataaaaataacttacaaaa

SEQ ID NO: 2441 - DNA, 213 bp, Homo sapiens
  misc_feature (1)...(213): n = A,T,C or G
tgagggacaggaacgcatggagatctgctacaaccacaacagaaagcaaatggatgtgggtcctgcctggaggagatttcaaggagaaactagaagcatgcctggcaggatggggaatgggccggatgattccggaagaaggaaaagactanaggagactcttcatggtttgcatttcattaaaaacctccagtttggagagaaacatgcaaa

SEQ ID NO: 2442 - DNA, 186 bp, Homo sapiens
  misc_feature (1)...(186): n = A,T,C or G
aagtggtgagcgaggtggngngccacgccaaggaggttgnacagaagaccattaatgaggnccnaggganagcccaaaaatcactganacaggngaggngaangaggtcacatgagaangacacccacaccatcactgatgctantnacccatgccggcaanaangnctggagaaaactcggcaca

SEQ ID NO: 2443 - DNA, 191 bp, Homo sapiens
  misc_feature (1)...(191): n = A,T,C or G
tgaggaggaagaggcagaaaggccaaagtttaaggccaccctctacaatcaaatctgaggccagactgggatataatataccacancaaaagaaatactaaagaataaaacacantgaagtngcctgcagtcacagaaatttccaaacactttttctttataattaaattgtgcacttgtatctaaaaaaa

SEQ ID NO: 2444 - DNA, 179 bp, Homo sapiens
  misc_feature (1)...(179): n = A,T,C or G
ctgttcctgcacacctgntgcngcacacctgctnccgcacacctgttcctgcacacctgctgctgcacacctctngtgctgcacacctgntcctgcacacctgntgttgccaattgacttttttggttgtttaagcnnnntntttctttctttctttctttttttgtgatgagggtagg

SEQ ID NO: 2445 - DNA, 251 bp, Homo sapiens
  misc_feature (1)...(251): n = A,T,C or G
gtgcccaggaaggaggctanggngacaaagnggacttaactgggatccggagcccttcagggacacaagctgaataacacagtcaacacccagggatctacacttcgtaatttcccctcaacattgccacgtggatcggtcctcagggaagccttccctctggcaggtgctccctactgtgtctgtctgtctcctggcttttagggacagtggcagtgaccatggttctcctacttctccaaaaaaaaaaa

SEQ ID NO: 2446 - DNA, 313 bp, Homo sapiens
  misc_feature (1)...(313): n = A,T,C or G
gtgaaagagcattaagacagacccttgaatacgtgatcctggcctatnaagatnacaggaggagaggagctgactaactgcttatctancaactgtanagtgcttgcacaatgganggaangattacacnctgaaanaactgcgtggggtcttgatgctatgaaatgattggnttgngaaacgcantctttgttgtaaccccatangagctgncccaattctgnactcgtggtccgtggtcctctacccctgcgtggagtactgggccccagagcacgcctggaataaaaagtcctcttgcggtttgcaaaac

SEQ ID NO: 2447 - DNA, 167 bp, Homo sapiens
actgaggcaatattcaactacctgagctacatcgccagcaacacatcttgtttcaggttccagcgacttccattgcaaagcaaatctgtcgttcctgtgttacccattcagtttgacagactctgtttggaaacaaaaaaactatattcaattccataaaaaaaaaa

SEQ ID NO: 2448 - DNA, 250 bp, Homo sapiens
gactgaggatgtgatctccgaaaacagaattttatgctaagattggctattgtctccaaaatacctagaatggaggtatgaaaacacagcaggtactcagccaggatctgctgaaggaatgaggaagaagacaagagagcaggtagccatgacaaccttcaagaacaagttgagaggatcggtaatcctgtgtaccaacacatctaagatgctactgttaataaagaagcgagtcacgtaaaaaaaaaaa

SEQ ID NO: 2449 - DNA, 232 bp, Homo sapiens
  misc_feature (1)...(232): n = A,T,C or G
gactgaggtgtttgcctgcnatcttcctgtacaccatttgtgntcctagtgctcatggaggccanaagaagacattgcgatctcctggaattgaagttacagatgctgtaactggtgtggtaatgtgtgggttctgggatttgaacccagctcctctggaggagcagntcatatgcttaaccaccaacctatctccgtanngttctattttaaaaaagattcatttattttt

SEQ ID NO: 2450 - DNA, 340 bp, Homo sapiens
  misc_feature (1)...(340): n = A,T,C or G
actgaggtctgacagatgatcctgggccagaggctgaagactgatgctccagcttcctgacttactggggctgtataggaggggttgtctggaatgaggaatgagtcacatactcaggtaacntcttnagaacctcccatctcacccccaaatgaataaagggaccaatcactgggcaagtagggnaaacttctgggttgntcagaggaagaaaggaagcagaananagttgggggctttttggatggggataatganagggccagatgncnctactagagncncctggcttanatgacanatacaccaggattccnccactggaggatttaaaattaat

SEQ ID NO: 2451 - DNA, 509 bp, Homo sapiens
  misc_feature (1)...(509): n = A,T,C or G
actgaggagagaagtggagacagagcactcttcttcgtggtttcgtctcaagatacagtgcagctcagctccaggccctttcaatggccccagagcactctgaaagactcttntactatgtgcggncnanattactagatcnagaggtcagaccanaagggganggtattgggcntatgccnacagacttcacattngngaacagcnagggacagctnntacaatctctctgaagagatctcagtaggactgaacccactggtccaggacacactgntcgttagcgtaccggaacaagagattaccgtactagggncggnaagaaggaaanattcttnacatctganctttccagatgnggcnanagnttggcttctcttctctggcagntggcctgcctgccaggatgcctgcccctgtgagcccccatcctntggcagctncagcccatgggaattcatcacctctgctggggacagnagnttntgcccttctgccatatataacag

SEQ ID NO: 2452 - DNA, 219 bp, Homo sapiens
  misc_feature (1)...(219): n = A,T,C or G
taccagaactcatcaagtgttgnngcctctgcatctgcccttgtnntngggccnggnacnggacaancttncactcntacacctacgngggntgaggnacttnagtgctcccagccagcactncctgcccagcataagctttaaccttttagtgaggagtatttngcccttgggacatgctnaggaaaaataaagtatgccattatttaaaaaaaaaaa

SEQ ID NO: 2453 - DNA, 346 bp, Homo sapiens
  misc_feature (1)...(346): n = A,T,C or G
agacaatgtcccaggcctgagtcatggattcagacactgaggccatccaggtggtggacgaggaaggactgaggcgccactgtccagggagtggaccaggaaggaccaaggcgaacaacgctgagctcttgactcatccctacttcttctatctctctatcccattattctttttttctttccatttttttgggggttccatgctgggaatcaaagntnngtccactgcaagataaacaagtgttctctcctgcccatttctttcatttgtttggaacaaagcctcattgatatagnccaggctggtcttgaactattatgaattattaaaactctagcctcgcta

SEQ ID NO: 2454 - DNA, 156 bp, Homo sapiens
  misc_feature (1)...(156): n = A,T,C or G
agaccgttgtttaagtgcnnacagagaaggcacagggganaaacgttaatcncagttgagcnactntacatctgtgcctgcggggnctaatggaatatcagnaggtaaccaatgntgtncgaatcagtcatcgtaatggncaagaagaaacacccg

SEQ ID NO: 2455 - DNA, 113 bp, Homo sapiens
  misc_feature (1)...(113): n = A,T,C or G
gtaaatatttattaaaatntgtaaganaaacacattttttttngagcgnggtaccccagccctccttttnttaccttcttnttggggctggaaagtgatgttgcagcagggaa

SEQ ID NO: 2456 - DNA, 204 bp, Homo sapiens
  misc_feature (1)...(204): n = A,T,C or G
actgagggactcactatttagccttggctgcctgaaactcaccatgtaaactaaactggccttgggatcacagatactcagctgcgttctgcctcccaagcgctgggattgtagacctgngccacacccgnagactttttttttntttgaaaagttnanacaagnntacaataaactntaatcttatacgcttaaaaaaaaaaa

SEQ ID NO: 2457 - DNA, 184 bp, Homo sapiens
aactgaggaagcaggtgtgcaacatgccttgcccttaagtggaacatctaaaattagtcctgctacaatcagtggctgggaacaaagtttcagccgtgtcttgcatgtgttaagcagatactgcaaagttagaagaaactgccaagcaataaaattcatataaacctggtcaggaaaaaaaaaa

SEQ ID NO: 2458 - DNA, 196 bp, Homo sapiens
  misc_feature (1)...(196): n = A,T,C or G
aggtaacaagaaatacaaaaaatgctatncacgcangagaccattctgtgctgcccaaaagtntctcanatggaaactncagnaagaccatctcctcaggcttncatggncacacctctgggngntgantatcctctgcntgntgnacnttntttgaccttcacttgctgngngaattataaacttactcattcaa

SEQ ID NO: 2459 - DNA, 399 bp, Homo sapiens
  misc_feature (1)...(399): n = A,T,C or G
gtttgtgctgatgtagcagcctgagnagaggccatnattacttnttgnggaactntcaaatgngcncacaggnagcatggntgantccatatatgnntatcccctaaccccaccccttactgtanagtctgnaaaccaatagacacggntccagaggctgagacgcggcaatnccaatctggagctgaagacccggaggattnctgnagagcggctgttctnagaggggggcntanganataacctcctatacccttanangggtggatcnntgagcngatccagagncatgagcatnaagangaaacatnaagtctccaggtgccttgcccctattctttccaatcccatgcctnagttgnggggaccgatggggaagctgagttaagcttggaacag

SEQ ID NO: 2460 - DNA, 146 bp, Homo sapiens
  misc_feature (1)...(146): n = A,T,C or G
ggccctcctgacccaagagaaggagcgttggagaaaacaaacacccccccactagcagaatcctctttggcaagcttaaacagcacatgacagtttagtagtataacngcttacttcaagaacataagcaacctcaaaaaaaaaaa

SEQ ID NO: 2461 - DNA, 298 bp, Homo sapiens
  misc_feature (1)...(298): n = A,T,C or G
cgaatgggtgaaaattgagtgctttcaaccatcatattatctaccttgaaggatacttagtggctgtgtnggcctgagttgccttggagaactgactcaccattgtattagaatctgcctanccatccagcagtccttaagaaagaagagcctcagagactaggacaggaaaagacacaggggcaacataatggcctcaacaggtctgantttntatacngggngnagaccacttgccctgtctgccaagagcttttgaccaaagccctgagtctaggctgtggccaccgtgtatgcc

SEQ ID NO: 2462 - DNA, 122 bp, Homo sapiens
  misc_feature (1)...(122): n = A,T,C or G
tgagtgtttggaccactcaatgatgantgacaaggagctcttcctaaaatgaaacaagcatcaaaggacaagaaaggagccgtgatggtggaataaacctcttaaaaatgaaaataaaaaaa

SEQ ID NO: 2463 - DNA, 194 bp, Homo sapiens
  misc_feature (1)...(194): n = A,T,C or G
aactgagggtctgaagtncctgggcctagccttgacaccagnacatggaagataaagactctgaagtcccagntctccttcctcacctnatgctaggatcatgggctttgtctatgcatatgactgtaaaaacagactaagctaggtgtagtagttcaggcctgtgataaaaatgagcaacaacaagaaaaaaa

SEQ ID NO: 2464 - DNA, 293 bp, Homo sapiens
  misc_feature (1)...(293): n = A,T,C or G
acctcttcttgatggnctatgtggggaggacgngagccagtganaanggaccacatngaanactctcnaggacacgataacagggatgacantcacatcgcccttgcatcacgcaaganactgnnggnatgtcaaggaatgaacagactgtctgggtgactgngacgcacactagatacaaagggnctgnnnngctgaactnnnacagtccatgcccatgtcccagttctgaaagtcatgaggnngatatncttgagcttattagaaaggcattgtctcaaaccatatacaaa

SEQ ID NO: 2465 - DNA, 360 bp, Homo sapiens
  misc_feature (1)...(360): n = A,T,C or G
acacagccaagattcatgcctgcgtgnatactggaacctaaccactgcgttctactgctgtgctggagagttgccttggattacacaaaaaacaaaccttttaacctctcaccaaatgagcaaacggtatgctcgaactgacttgagaggaagcagcagcgctttttaagcgtgngctncagacgtctctgcggcacgngggtaggtntacccctggccaacagagcactgntctgaccaggaagccagccgcacactgtaaatctggttaaaagcccgccagtgcaccccctntctacactcagaccacactagtcattcactngcangaaacagggcaatnccaagaggtccccataa

SEQ ID NO: 2466 - DNA, 273 bp, Homo sapiens
tgagagctggactggccattatggaggaagaggtacagcagcactcacactgtatgaactgtgtcagtagacggtgtatgaccagaccagagcctggggtttcctgtgacttgattggctgtccattggtttgtggagcagttttccattcttgtaaagctgacgaacatcggctcttgtgtccctttgaacgagtagcttgcttaaatagaaactttggatgtccatttaccctggcacgaaataaagttgctgaacatctaaaaaaaaaaa

SEQ ID NO: 2467 - DNA, 113 bp, Homo sapiens
  misc_feature (1)...(113): n = A,T,C or G
accatggcacccagtgcgcaggcngcttctttgcntnnnaggcctaggngactatggtcgttaactcccntgccaaccacaaggagcatntatggcatacgaggtattttttt

SEQ ID NO: 2468 - DNA, 349 bp, Homo sapiens
  misc_feature (1)...(349): n = A,T,C or G
agtggctcattgattcanctgtctgcaggggcatcagaatgnggccaggggaagcaaaaggccacaagctgcaaggttcctggtgtgtnacactctgtggnannggcaanngctcagggaccaaaacctggtcaggatcacttnctcccagaagnacctgtgagtatanngctacgancattggaantctnnatccctnaggnncactnctgtgaagcantaccacaggcacagagagcttcctctgctttgctcgtttgtgtccccacancagcacctgctccacaggagatgctcaatacatactccatggattttcaagggcacccanttctaggattacagacca

SEQ ID NO: 2469 - DNA, 143 bp, Homo sapiens
  misc_feature (1)...(143): n = A,T,C or G
cctggcagattctgaacnnanctcgaaagcaacaagaggcaggagtggtggagnantgcctttctaaaaactgagactgtggccnatngagacctancctggttttnccttagacantgagtgangtgttttttttgaaataa

SEQ ID NO: 2470 - DNA, 175 bp, Homo sapiens
  misc_feature (1)...(175): n = A,T,C or G
acatctgaactgaacatgttgcggctgntctcanacccactgccacctcctgttctagcgntnangggggtccacantnncttcctaattctggcttctgagttctgtgctctttggcgtggaacttcgtacatagctnacnnaatttctgcttctctgcctccacttcccaaga

SEQ ID NO: 2471 - DNA, 188 bp, Homo sapiens
ctttgagactcctccagcacccgtacctgatccgcaggattgaagagcttaacaagacaaccaaccaaaaataatgaacttaaaacaaaaatataattattcattatttctacacagcattcaactgcgaccaatgacatgaaaaatcatcgttgtaattcaactacagaaacacctaaaaaaaaaaa

SEQ ID NO: 2472 - DNA, 171 bp, Homo sapiens
  misc_feature (1)...(171): n = A,T,C or G
ttgctttcgagcgctggagattgaatttcagccagctcgaccaagaccacgaagtcttacttacagccgcagaaagaaatccggatatagcagctctcagctactgttccagcatcatgcatgatgtcatgatcctgancataataataatggacttaatccctgaaactg

SEQ ID NO: 2473 - DNA, 274 bp, Homo sapiens
  misc_feature (1)...(274): n = A,T,C or G
actgaggtcctgcgtggatattggcagtgtgngcagaaaaatgcccaccatagcttcctcacccatctatgcatggcctctgttctcccctataaagactgcatcttctgaattagctttgacctgtctccttggaccaactgattaccgtagaccctgcctcctccgtttgcatttatgtaataacttggctccatgttcagctgtatgcacgaatcctgtctntctgtttagngctgnataataaacatacttgtacttccaaaaaaaaaaa

SEQ ID NO: 2474 - DNA, 233 bp, Homo sapiens
  misc_feature (1)...(233): n = A,T,C or G
tgtggctgcctagcacacccgngaatgctctctntgatcncncactagatgactntganactcgancntgancagnatcactgaagctctgatctatacctatggnatggganccgctacactgtggactctacccataanggntgaccctatggcttactcactcacccactcnnttgcngtgggaccttggaaagccnntgagctgagctantctctctcccataaaatgg

SEQ ID NO: 2475 - DNA, 147 bp, Homo sapiens
  misc_feature (1)...(147): n = A,T,C or G
agaaattgatagcatgctcaaaacttgccggacnngctgtganttcatnannaaacncacannnttgncctctcgcaccgtgaggcagaacatggctgaactacctggaccacaccctaagccaatctaataaatcctcctttaata

SEQ ID NO: 2476 - DNA, 374 bp, Homo sapiens
  misc_feature (1)...(374): n = A,T,C or G
cttgcggaactctcatagggnggacaggaatcannaactgncaaaaaaaaggttngccnnggnccccaaannnanacacctctntncacngggaactgcncgagtggaagaaaaataaacaaggaagaaccgttccagagctatggaggcaaagtgtggacagaggacagcggtntgtggggagctcanacaccaagggcaaatggacagaggcacactggagccactgggtacagtgctgtcagaggactgccacagttagtctgatggtttctaggacagcagctcccccttctgtggagtgatcacagcacataaggccagactgcttactgaggngagactagacgccaagagaaagcaagcatgggtta

SEQ ID NO: 2477 - DNA, 141 bp, Homo sapiens
  misc_feature (1)...(141): n = A,T,C or G
agcctacccctcctggtgnactgagcccctcccagcaggcangtgatctggtcggctatggcnnnggagcattcctgnagccagccacaggcntccctganacagntnaatntagctnggcagtaaactgactcctttccg

SEQ ID NO: 2478 - DNA, 402 bp, Homo sapiens
  misc_feature (1)...(402): n = A,T,C or G
gcatatgaagaaaaccaagcangcctggcctggaatgatccttctgaagcccacggaaaaaagagcaaatgaaagtagtgngtgcagnggtggaggatgtnctgcagcctgcntgtgaggagcctgaggtacttcaatgctgnccaactctgcaagangccctgagggagaaacacttttgcctgtnccctcagnaggacctggatgctagcgaatantgggccatgcggactggagaggcagataccagcccagctcagaagtacgctacacaagagtgtccaatggtagcttgaggttttctagaacctgcttgnggcctggcaattactcatggcttnggagtattcctctgatttaaagcagaataaagagagtattgcnagcatcgaaaaaaaaaaa

SEQ ID NO: 2479 - DNA, 164 bp, Homo sapiens
  misc_feature (1)...(164): n = A,T,C or G
gactgagggaatttaagcagttttggcctagtcatcggggcctgaagaggaggcacagcggccccgagaatcactggncnctgctcctntatgctgctgctggccgtcccantccgatncaggatgnntgnggtatgaatnattcacagggcctggaatacttt

SEQ ID NO: 2480 - DNA, 428 bp, Homo sapiens
  misc_feature (1)...(428): n = A,T,C or G
tgtgtagtctccttcagagctgctgcccgagtggaaatgctctcagtggagaatggcctggaccctcgngntggcnngcaggtcatcaagaagaagctcgtgggatccgtgaaggctctgcanaaacagcatgttgtctctggacacagtggtcaccantgaagatgganatgccaacaccatgttgcagtgccctggaggnctgtgttcatccactntttttttatgcnggggggnatccacaccgaggcttggcngggaaaaaggaaagaancacacctccaccaagaaggctcttgccttcnccctcgtcttcttgagcccccttctgaaagccatcacccancagacncatntntctcagattnggnagcncctggtnttgatcaaacaccagatgttagggccgntncccgaacctggctgcg

SEQ ID NO: 2481 - DNA, 118 bp, Homo sapiens
  misc_feature (1)...(118): n = A,T,C or G
acccggagatcagaagttcctattcggangttgctattctntaccaaagtataggaacttctcgacctgcaggcatgcaagctgggggggtcganttngaggaaggggggaaaaaaaa

SEQ ID NO: 2482 - DNA, 186 bp, Homo sapiens
  misc_feature (1)...(186): n = A,T,C or G
cgcatcacattacctggtctacatttaacacangntgcatgaatggctgctgnctgggctttcnttgnctacatctactcaagagaatacaangggnaccaggnngatgggggggccnanatgactggncgcccaagcccatgctttatttntncangngggngaaacatacttcctctgggcatc

SEQ ID NO: 2483 - DNA, 178 bp, Homo sapiens
  misc_feature (1)...(178): n = A,T,C or G
cagtggacatgaaccctcaagagctgcttgcttacgcccatgaccacaacngtagcncgacagnaattgctgntttncctaagcagataattacatntgtttcaggactctagaaacaaanttctaantgggcattataactaggcataatcttccaataaaggtatgaaattcatct

SEQ ID NO: 2484 - DNA, 300 bp, Homo sapiens
  misc_feature (1)...(300): n = A,T,C or G
tgaggtggggaattctggaggcgcactcagtgcgaaangctnngaagcaaaagcntnttaccaggatccncccgaccntgnggaggnaatctttcctaaccagattgganatagttcactntcacataaangnctccctctcttcattttgtgtatgatgggttaactngtttttcaggggagttgtgattactgattaatttnagaannttaaantgacagactgtntanagattnnggganganttaatgtanagntgttaacacagaaaaataaagttgnttattacattgtttcaa

SEQ ID NO: 2485 - DNA, 357 bp, Homo sapiens
  misc_feature (1)...(357): n = A,T,C or G
ggctggacagagtgcctgctaggtctatgaagctagaagcctctgcagtctcaggatggccgtcgaaagcctggaggatttctggaagcctctgggcttcagtccatattggacaaccaaagaaagtaggtcgtgaaatcagcaaaggtatgcagccgcagtgacggtaatggcggctgcaaccacagcagagcagctgaacatgccagcaagatgcanagtnnacgaagcagcnagagaaggtcttctctcagatccccctttatcggggttgctgtcggaaggttctgcccatccttagggtgtatcttcccacttcagttaataaaagcaaatcctccactcacaaaaaaaaaa

SEQ ID NO: 2486 - DNA, 170 bp, Homo sapiens
  misc_feature (1)...(170): n = A,T,C or G
agaggcagaggcttgtcaatgatgcatgattcgattncgggttgatggacaaccaatngatgntnttgaccctttanccngggnnnccganggatcttttttttnaagcntgggntgntttgcttatctaggtgactccttgggcatgtnantaaacttctaggcatctt

SEQ ID NO: 2487 - DNA, 102 bp, Homo sapiens
  misc_feature (1)...(102): n = A,T,C or G
tcctattcagaagatcctattctctagaaagnataggaacttctcnacctgcacncangcaagctgggggggtntttntgcgagaaggagggacggctggat

SEQ ID NO: 2488 - DNA, 171 bp, Homo sapiens
  misc_feature (1)...(171): n = A,T,C or G
gactgaggtggggaangcacacaggccacagccgagccgatggaggaagcatcagcttanaccangcaccntgnngctttgaggngccanccgcctgnttntgntgacactgagcangcagngtggagttacccccagnccnaaagctacaaaaaaagacatggcatatag

SEQ ID NO: 2489 - DNA, 281 bp, Homo sapiens
  misc_feature (1)...(281): n = A,T,C or G
ccctcttgcctcagcctcctgagtgctgggcggatggacaaggttcttcatggtgttctttatgggaccccctggaatctgtaggatgcccaacaccaccctagagatacactgcctcagtgtcaacagtgtcctccacaggtaccacggcagcacccagtagtctctccaggccaatcaattccaaggcagaactgtccagctgacaagcncnctctaaggccgngagtgcaagtttggcacacccactcaaaataaagcaacatgggggttcccacgga

SEQ ID NO: 2490 - DNA, 138 bp, Homo sapiens
  misc_feature (1)...(138): n = A,T,C or G
accccaccacttgggggcanagaagaaaacccgncacnggggggccaantncgggaaaaggccccaaggnaaaaagntgaagaagaaatggaagggaagaaaanggtttccnagggtttgggcccgttaccttaagga

SEQ ID NO: 2491 - DNA, 173 bp, Homo sapiens
  misc_feature (1)...(173): n = A,T,C or G
tgacaggcctgagcangagangagtggtctcgcctgtgaacgttaagagacagagtctgnaactatgagttcctgagttcgaatcccagctnatagcactaggcagctgtgngaccttggctaagacacttaactctctgctggtgcttcttctcttcattctattatatata

SEQ ID NO: 2492 - DNA, 287 bp, Homo sapiens
  misc_feature (1)...(287): n = A,T,C or G
gactgagaactctcccactacactgggaagcagagactccagctatgctgcccgggtgggaactgactctctgcctgcttgtttccttgggtttccacttccgctctttctatgaagtttacaaagtctccagagagcatgangaggaacnggatcaagaatntgagctggagatggacactctattagnaggactgaagaagganccagactgattttgagnggaacttctggatggaangggggaagcggaggctggtggnggctcttnattgaccatatggctg

SEQ ID NO: 2493 - DNA, 358 bp, Homo sapiens
  misc_feature (1)...(358): n = A,T,C or G
tccagctctatgcagtctattccacactccgatgaagcagacgtggctgggatgacccacgcctcagaaggccaccatggcctagggaccagcatgcttgtnccacagaacccacaagggtcanaagacagcaagccancaagaaactgcantggatttgaagatgcacaggacccacagactgctgtgccctcacctttacttcccatggcttcttgcagctctcagaaaaccagctaacagaagtcggaacccttgaacgagtgtatcctgctatgtatccaatactctgttaggcaaggattcatgtatgcacttagtgagatgataaagcttggagatattagaaaaaaaggat

SEQ ID NO: 2494 - DNA, 142 bp, Homo sapiens
  misc_feature (1)...(142): n = A,T,C or G
ggaacccagaattcattctacagggcccagagtgtngaccctcaagaaggggtgggggtcagcttnaaaggccacttcagcttgctctnnaggtggtcttttggttgggaaanggaaangaatatcttttgtttggaaaaga

SEQ ID NO: 2495 - DNA, 159 bp, Homo sapiens
  misc_feature (1)...(159): n = A,T,C or G
ctgtcttcacgctaggccgttttttttttagcgnggggggnttcgttccccnagaacttacatctnctctgnccaaccagagnctcctgcntgctgctggtgcnncccnaacctggacggatgccccanacatacccaaccccctacaaggcaaggctg

SEQ ID NO: 2496 - DNA, 124 bp, Homo sapiens
  misc_feature (1)...(124): n = A,T,C or G
tcgggggggagctttctgcngattcgcnntaccacgcccanngctgcanacctgaagagccacacacgtgcanactttntactggaccaccagattnntcgangtggaatatgggtccagctcc

SEQ ID NO: 2497 - DNA, 163 bp, Homo sapiens
  misc_feature (1)...(163): n = A,T,C or G
acagacctgtaccggnaggcatggaatattcctttcctgaaggctgcccggtctattaaaggctatcagtggagcctgccaaattatctagtgcccaatgttccaggttccggcttggcttctcctgatgatggatagactgtaaccttaggccaaataaact

SEQ ID NO: 2498 - DNA, 129 bp, Homo sapiens
  misc_feature (1)...(129): n = A,T,C or G
actgagactcatgtgcgccttccataggagctggaactggattgaanataatggngagccatcgcttggncactgagaattanncctgggtcctctgcaataacagcaagngccttttaaccccaagcc

SEQ ID NO: 2499 - DNA, 166 bp, Homo sapiens
  misc_feature (1)...(166): n = A,T,C or G
atattacgatgaagcccgaagtncacctcataattctgggccttgtgaacttgacggagaggtcccgttacggaatgtctgacatgaccaaattcatctgctgaccctggacactaacagcatgctaaatgacttctagctctgangaagaccttaaatgagggta

SEQ ID NO: 2500 - DNA, 137 bp, Homo sapiens
  misc_feature (1)...(137): n = A,T,C or G
taatgaagtgctccccactgttcaagggagaanaaattcctcctttgctgactggaccctnggggccttttcctcaaagaactccctgggaagcgtgttngccacaggaggaagcggagaaggctgaagtgctttca

SEQ ID NO: 2501 - DNA, 151 bp, Homo sapiens
  misc_feature (1)...(151): n = A,T,C or G
agatgcccagcacagangctcgccntgaatagttcccatgaatcgtaggcctntncgatattntgttctntgacacattctctgcataaggttatgttncnataccacccaacattncagtgaanganctatacatgaggaggaatcagga

SEQ ID NO: 2502 - DNA, 170 bp, Homo sapiens
  misc_feature (1)...(170): n = A,T,C or G
ccctggagggacctganctgctgctngctgccnacagcatacctgcnannatagtggaatccattntctgctntggaggatanagacttctcgccctgcangcatgcaagctgggggggtcganttnttaganggngggangactggatagaggggtggatcggaggcgg

SEQ ID NO: 2503 - DNA, 263 bp, Homo sapiens
tgagagtaaatgaggcacaagagtaacctgggtggaaaaagtacagaatttgactcttcacaaaatccagcagacctgatacaatcttcacactctctacttcctaccggaggcttgacgtgtcaccaagtattcccctttctccgaggcccatatagaggagctctagatctgatgcctaaccatgaggtttccttggactaaagaaacacaattataattcctctattttcattgcaccctccagctccaaaaaaaacaaa

SEQ ID NO: 2504 - DNA, 110 bp, Homo sapiens
  misc_feature (1)...(110): n = A,T,C or G
atggaacactgaagaagccacncanctgccctcnttgtacnggaccatanatcattngtggggtaatctgggtccctcttccccttnctttcataactggcttgacaatc

SEQ ID NO: 2505 - DNA, 370 bp, Homo sapiens
  misc_feature (1)...(370): n = A,T,C or G
tgaggccgccgtgctccatctactgcagcatgnggaaccagagcctctcccactggaccctggtttctgtgctgaccttgctggcctgctgccttgtntacacgctgacaggggtttatggcttcctgaccttngggcctgaagtntctgctgatatcttaatgtcctacccaggcaatgacacagccatcagtgggagggacacaggaacccttgtgaccttcntggggntctagaaaacagtcaacagcattctcatacctcagccatttttttttctgaagacaaataatattgncatgcttcatataaacctgaacgtgccaggctgtgaggngggcatctctgcaactgccaactcctaactgtg

SEQ ID NO: 2506 - DNA, 112 bp, Homo sapiens
  misc_feature (1)...(112): n = A,T,C or G
gactgagccttaccaacaagtatttgtcgctgttaagagactagtggatccaagaacagaaaaaaggngaaggccttgnctttnctgnnttacatattcacagtgcttaggg

SEQ ID NO: 2507 - DNA, 379 bp, Homo sapiens
  misc_feature (1)...(379): n = A,T,C or G
gcttcagcacagctcttcgctttcttctccctcgtgagtatacttacatttgcaatccatctcagaagctgccttgttccagaggctctccctaaggagtctgacccctgtcagcagtgtctttacataaccagcacactgagaacatttcctaaatgaacacaccaagccactcagtgaattcgtacactagatatcacatttttttcaatgtctgctattatataccgancaggaaaaggctgtgagtgctgttcagggcattcccagcctaggagcagatggtagttggagggtatctaatgtctnccagtttacctaacacagnaaagacantgtatccaaatncactcagatccctctgacgggggcgaggttt

SEQ ID NO: 2508 - DNA, 472 bp, Homo sapiens
  misc_feature (1)...(472): n = A,T,C or G
gagtgggtagagacaaggaatctcagaagcctctgaacatcacagaaaatgctggggctcgaggacagggtcctgtcaccaagggcagctaaccatggttgatcgctttagcaactaataggtgatccagtctctgggaaactgtttgaaaatagaaccctgctcataccatgcacaaggcaggacatgaagaacaggtgtttttgttttgntttgtttctttttttagactgcctcctttgttcaaacctcttctctgagtatccttgacgagagaggttccacagacaactctganacctntgttnagctatacttaaaggaccattnatttatacacaggtggntgnntnanggtaacaaangtatgatcagagctttccttntgagctncagggntacagagctacactgctactgtgtatcccaaaaatacctctgtattttctgactcaaactctgaagaccacgg

SEQ ID NO: 2509 - DNA, 208 bp, Homo sapiens
  misc_feature (1)...(208): n = A,T,C or G
tgagatgcctgaatttactgccctgcactcggcntcttcccgctccattgagacaccccagtggacactcggttgttgacatccacaacaccactggttcaaggctggagcgggtaatctccctatgaggaaaagcttcttacaactcangtggaaagtccaatgatgacatccatgtagcggggaaagactccacattgaggtctta

SEQ ID NO: 2510 - DNA, 398 bp, Homo sapiens
  misc_feature (1)...(398): n = A,T,C or G
actgaggaagttgctcaaaattcttcaagatcaactgaaacaaactccaccacaaaggagaaaaatgtcatcgtccccagcagtacccatccgcggttgcttttctcctccgtgaggctctcgccatctgcctttaccttctcaacagatgcagcacacaattccaatccaaagagaaacaagtctctcaccaggttctccttgcanacactgaactnggaattacnganctctccaaacgaggagcacatgaagctagagcctggnttcgtgtngnacagaaacggagctangacttgaaagcngacccagacaggctccagtcagntggaaggtgggggcttnaaatggaagcaaaggggctctggttctgcaatagaagcaacaaagaccctgga

SEQ ID NO: 2511 - DNA, 152 bp, Homo sapiens
  misc_feature (1)...(152): n = A,T,C or G
gactaactatagccantcttcggnagtgactgncagatatggacctggtnacatannnatnctgacctgagagagttctnnnaaatnttccggncccaggacatcgacagctggtattgctgnacacctgttanaatgttacagatgcggag

SEQ ID NO: 2512 - DNA, 325 bp, Homo sapiens
  misc_feature (1)...(325): n = A,T,C or G
gtgccatatggacagattnttanctgtaaatagagngtggatcttctgagaacagggactgtgacttttacgaaccccaaaaggagcctcggttggacatttgaagattcgtggaattatgctctatgaaataatttccagtgtgcaccaggtggcgtgcgccaccgatgcgtggaanaacctttgntttttgtttggggntgttctcatagatccaatgggctcatcctatgtgtatgagtttatgcctgtgcaccacatacgtgcctgctactctcagatgtcagaagagggcattaaacaccccgggactagaaaaaaaaaa

SEQ ID NO: 2513 - DNA, 104 bp, Homo sapiens
  misc_feature (1)...(104): n = A,T,C or G
atgggactattacttatcggccatncaatcttgagctggnaaaccttattttcctgtnntataaaatataaaataaagtcctgtatactctgcaaaaaaaaaaa

SEQ ID NO: 2514 - DNA, 237 bp, Homo sapiens
  misc_feature (1)...(237): n = A,T,C or G
aggctgggaaaggctagcaaaactgtgtngaatcccatggaactggaactatanacagnagtgaaccaccatgtggttagctgntaatnggacctgggncctcngnagganccatnagtgctcntagncnctganccatctctgcagncccttatctgagcctntaatncctncttccagcatccttagtggcatttatgtctaaatatgagctntcaatttcccataaaaaaaaaa

SEQ ID NO: 2515 - DNA, 394 bp, Homo sapiens
  misc_feature (1)...(394): n = A,T,C or G
tttactgtataatcctgaatgtccttgaactcttggaattcttgccccagtttnccaagtgccaggattacagccatgtgctaccatactcctttcttccacaccaacctgtgtggaatagaaacatagacgtgcttcctctgcagcctgttggttgtctctggagctgctgatagcagttnggtttggttnggtgctggggaatcaaacctangatntnatgcatnctaagcaagcactctacaaccaagcctgccacagccccgacctgacagcaagtgttatannaacgtacaaaataaaggttaatggctaagaaaccanantaaanagaccacttnatgngaatgacatttctgaagctactgaagggggncaccttcactccaaatgg

SEQ ID NO: 2516 - DNA, 140 bp, Homo sapiens
  misc_feature (1)...(140): n = A,T,C or G
gcacataaacagcttggaggaaatttcttggaagccgtggnggagtgttgggntaagaggntccntgctgtgncancattanttgggngggacaggcactcacactgtggaggaagagnngngatgaccaactgcttact

SEQ ID NO: 2517 - DNA, 102 bp, Homo sapiens
  misc_feature (1)...(102): n = A,T,C or G
ggacgtggagagatggctgcggccactggntnagannncttactagcctcncagagaactgctntccttntcntnactcacatgacgagccacaaccatctg

SEQ ID NO: 2518 - DNA, 144 bp, Homo sapiens
  misc_feature (1)...(144): n = A,T,C or G
aaaaggactccaggagtttttcnaaggacacctaccaaaagttaccgggagcaagggntgaacccccagggngggaaacactcnaagccnatccatatgggggntnggacntgntggagggcatagctggtcctttgggagcag

SEQ ID NO: 2519 - DNA, 290 bp, Homo sapiens
  misc_feature (1)...(290): n = A,T,C or G
gactgaggatgtaccttcatctactcttctgnagccanntgtcctgcctgatgatgntggactaagcctgtgaaactgncagcnagccccaaantanactctttccttngnnagagatgnaaataagccngnaagtgatgtcagccaagcatacnataaagaaacccataccacggntctccntgtgccttctgaggcagngtanccctgncaaccctctgatttcngntntctganactnantntggacatctggccttcagaactgngtaataaattcctattgttta

SEQ ID NO: 2520 - DNA, 276 bp, Homo sapiens
caagaggccctgggccggctctactgcaaggggagagaaaacaggctctgcctcgtgaggggccagcaatagggacagaacatgcgtgggacaggacacacttcagtgctgtatactggactgtgttagtattccaatgggtgtctgctatggcaggatcctagactctctggatgcgagctcgggttccgagccccatcttcaccaggatccttggtgatttctggggcccatgctctggagctctggcccctggaacttgaacccctgatcctt

SEQ ID NO: 2521 - DNA, 212 bp, Homo sapiens
gactgaggttgagatggattggccagttaacaatagaagccagaaagtttggagagaactcttcgctagtgggagaagggacgaatacaaattcagcattcattttggaaatagaaaggacttctgtctgaatggagaagcacattctggctggctgcaaactggacttaaaatcatgtacttaaaaagcttttaatggttaaaaaaaaaaa

SEQ ID NO: 2522 - DNA, 375 bp, Homo sapiens
  misc_feature (1)...(375): n = A,T,C or G
caagcccactctgcttctaccgggatnggcgtgtgccccancaggccctgcnttatccagaantgntctgcagnactggccagccctccagaagngggncctgnnctacttaagagccncggngatgctccangnaggagagtgtgnctgngacgccagatggtnatgcnnacgcggtgcgaggggaccgctttgtgatgcctgccnaacgccgnctgcccatnagccatgtactgaatgggttgaagggncngacccagcacccaggannnctnnatgtgcngaaacagtgntncaacctgcccactgagctgccccagcttctgtctgacattgagtcccatgtgccntgggcctctgagtcactggggaaga

SEQ ID NO: 2523 - DNA, 199 bp, Homo sapiens
  misc_feature (1)...(199): n = A,T,C or G
tgttccggatgaagaggtggccttggtccagctcctgttgcccacagggtctgcttacaactgtgngagccagcttggtgagctgggcctcgtggagttccaaaacaagntctattcaggcaccggctacaaagctcagccccttcaccttcactgtggacagagactagctacccactgcaatccctgcttctccgaa

SEQ ID NO: 2524 - DNA, 237 bp, Homo sapiens
  misc_feature (1)...(237): n = A,T,C or G
gacagcatctagctcantcanttcagacagtnattaagntccacaanccggngaatgaagaaactgtncacancttacagacgannaagctgangcaccgagaagctaaggnatttatccaggacctctcaacaagtcatgccaacactggggtgtgcaccttgaccccagggactccatgctgctgctctattactgtaagttgggtcttgaggcaaaatgtatattctgaagttc

SEQ ID NO: 2525 - DNA, 351 bp, Homo sapiens
  misc_feature (1)...(351): n = A,T,C or G
actgaggcaaagtgcaaacagcggtgcagatgttacatcaggctcctatgtaaggaaaccactgtgatcatttgtcatggcgnatggnttgccaagaaggaacacagtacaaaccattttgaagggcagctgttataaagtacatgacccntgagacnnngcgtgactcactnagacnagncaacacnnacttgacagannannaggctgncatnntnggcaagaattcantttttngataaggngggtgaatctctacagcgacgccttacncanccaaggaaacgccacnttnnttcaatagcaanaacctggcnctcnggaaaagcatgtntggaagcaactctccta

SEQ ID NO: 2526 - DNA, 102 bp, Homo sapiens
  misc_feature (1)...(102): n = A,T,C or G
gtactgaaaactcactgcgctccttgagaacatcctnaacactcatgccnngctagcccatcccaacgtcccactgaaggcnggccggatgctccctactct

SEQ ID NO: 2527 - DNA, 144 bp, Homo sapiens
agcactgagtctcagacacatacagggccaagaaccacagccttggcgatacaacagaacactcgctatccagagggtgtggacactaacccactcatgtacaggaagggttacagcttagatttaactaatgcggtaggaaga

SEQ ID NO: 2528 - DNA, 297 bp, Homo sapiens
  misc_feature (1)...(297): n = A,T,C or G
gagactgagcacgaacaagtagaggctgactggagacnggctcaacaattaacatggcacctgaatttgcttccaatgggaaccaaatacccatcatgtcaagtggttcagaactgcctctaaatgcagntnnagagactctgactccctcttctgaattctacaggccgcctccactcacatgagtccgcgtgcgcgcacacacacacatttgcacgnanttnnaaaatntntcttggggggggctgggcgagatggcccaaagggntaanangcattgactgcctcttctgaagg

SEQ ID NO: 2529 - DNA, 214 bp, Homo sapiens
  misc_feature (1)...(214): n = A,T,C or G
tgaggcatgctcccttcncactgataggnngctgaatagtcntctgaactgaatggctgccctcagtttcgtgaaagctggagcatctnangatggnatcatgaggactgggagatggcactgcagaggaacagaactgactccagagtgttgaaggataatatcatgtggaagagaaattanattattttgtatcactcctaacaaaaaaaaa

SEQ ID NO: 2530 - DNA, 202 bp, Homo sapiens
  misc_feature (1)...(202): n = A,T,C or G
actgagccagttgaggccagcctaagaaaancgggagcctatgtaggaagtccttggctcnctggagaccctcaaaganntctatgcccagtggttacttcttcaagactaaagaagaaaatacaagaaagtagtccacagaaaactaagaagcatgctaaaaataaatgatgggagttttcatgggtttgaaaaaaaaaaa

SEQ ID NO: 2531 - DNA, 180 bp, Homo sapiens
  misc_feature (1)...(180): n = A,T,C or G
ctgaactgccacaagcaaaagaattagggactganncagagtactgtaacacccacanctactnctganccttgtnattantggnatctaaatacgggngtnaaacncaaaacctggacggcnaggaaacaatccctcctaagaatgggncnncntccccatacccttgttctttctagg

SEQ ID NO: 2532 - DNA, 151 bp, Homo sapiens
  misc_feature (1)...(151): n = A,T,C or G
gtctactgaagaccagagcatatccanctcttntgaanngagcaagttctggattntngggactttctgtgnataggnagncattgttgganngggggggacaacaacccttaaaccattccaataaaanccctttatatatacataaaaa

SEQ ID NO: 2533 - DNA, 143 bp, Homo sapiens
  misc_feature (1)...(143): n = A,T,C or G
acccacgtctgagcaaggcttcttgnnatagatgtccaaggagaccatgaaccctctgatttctctggnagggggngttaccagggagctgtanatctcatngacctggattttggaaattaaactgcaagtctttggcagag

SEQ ID NO: 2534 - DNA, 207 bp, Homo sapiens
  misc_feature (1)...(207): n = A,T,C or G
gaactgaggactttcccatgacagcactnnagcacctgaagtcctgngtagtcagcacagntacggagagatgagtgannacctnttcttgattccttcttccatggangancaanaccntagtnnggaacnacccagggctgaggtgtagctgagcnntaangcttcccnttttagcctgctcacgaggtcctgggttcccccccc

SEQ ID NO: 2535 - DNA, 157 bp, Homo sapiens
  misc_feature (1)...(157): n = A,T,C or G
gaggaggctatcccagcactgtgggagaagcacagcccccaggtgggcagnagggcatcgctgaaagtgatccccaccccctagagcctagtcactgntctgtcactatgaggagtcaccatggtcatggccacagncagtcataaaagccaatagg

SEQ ID NO: 2536 - DNA, 491 bp, Homo sapiens
  misc_feature (1)...(491): n = A,T,C or G
gtaatatctagtgtaccggcatctccctaagtcttcctgggctcggttcgtggcgcgaggcagcgaagaccccgtgcgtgcgctgcccctggcaggggctgcaaggaaaggatgccttcggaggcgcagaaccccaaatcccatagctgtctgcgctcgggaggaaaatagctttagctctaagtcttggaagttccttggcaagctgttggagatcagttcacactggaaggctgaagctgtgctctgagagcagcaggagatggcagtagaggttgtagactcaagcattcatgaagaggatctgtcaggaagacagcaatttttctctccggcttttcactgagaagtaatgtcaactttcaggatggcccttacctacacaggcagccttgcctcaaatgccctcatagagtctcttggtggattctaaatagtcttaaattgacaagaaagaccaacaatcaccntaaggaaaatgcaacaagtaa

SEQ ID NO: 2537 - DNA, 431 bp, Homo sapiens
  misc_feature (1)...(431): n = A,T,C or G
aactgagatagaatcctgaattcctgattgtcaagagtctaagaagcatatgacagccattctccaaccacacagtcaacctctcactgctttcttataaagtctacggtgtgagaagatagatnaatgaataccnacaccngggncatgatnaggtaccttggggaacaatggaaggtagaggancgtgaatagttccaagngnanaanccacccncactccgcatncattnntgctnnggcatgnaaacactgancggngatntaangacantggcccccataggcttggctntttgatcaagggggnctcagctctttgggtagggataggaagcacagncttgctagaggaagcntgncatcaggggtganctttgaggcttnaaagccatgcaccattcctactgannnctactgtagagcctgag

SEQ ID NO: 2538 - DNA, 248 bp, Homo sapiens
  misc_feature (1)...(248): n = A,T,C or G
gaaattttacttcgacctganatggcctnagccagcgtctaanatggnagagnccctgcacagtcttgccctgccacaaaggtcgagcctccctgncgatggngccantcacagagaagactatgctcctgtctgtccagctttttgagaatcagatggtanaccctgccctcggngtactaaccagccagcanaaaaattgtattgctataaaacaaaangcnaantaattacatgaagtaataaac

SEQ ID NO: 2539 - DNA, 113 bp, Homo sapiens
  misc_feature (1)...(113): n = A,T,C or G
tatctacagatgtatgagcagngcantangtgttgccgcattccgataantcttcaatggtgaaaatggtnctgaaaataaaacaggacaggatttttattgaaaaaaaaaaa

SEQ ID NO: 2540 - DNA, 360 bp, Homo sapiens
  misc_feature (1)...(360): n = A,T,C or G
cagaccctcagcctcanannaggtcatgggtctaaaccaagngagaacntgnagcnnantaagccaggaggaagccagatgaaaccatagnttttntnctccgnggggngtggcaaagaccgtgttttggagaaaaccttanatgcacagtcaacatcagcaaaaatncccggangggattgtgtcatactacgaagctganaatgncgaaggnaaccatncgcanagtgaagagagagcnctacnagactggccggagancancttnnaactatttcatctggaaagagaaattaagtggcccaaaaaaccctccacctttaatcnatttnctttcctgaangggagaagtaccacagc

SEQ ID NO: 2541 - DNA, 250 bp, Homo sapiens
  misc_feature (1)...(250): n = A,T,C or G
tcctaactgtggtcgctagccacacccggagatgtgttctgngatcnctcactacatnactttgagagtgaccttgannaagtcactgaaccnagattntatnnctctggntgggaacgcgcnnntgggtggattctacccatagagntngaccctatggnttactnacttntccactnnctngcnatgggacctttgggaggcntctgtgctgatctagnctctctcccataaaatggactaatggttg

SEQ ID NO: 2542 - DNA, 215 bp, Homo sapiens
  misc_feature (1)...(215): n = A,T,C or G
cttgaggcctttctagnacggaggttgccgacagcgaaggggaagcagaagtcactgccaaggacactcccaaggaagtcacaccacgtagtgtcggcatctattagacctgtgattacatgacacacagccccgtggccagtctctgtgcccagtgctgtgntcctccctgcccactgccctcatgtttcgccagtgttttcaagtcatgtttt

SEQ ID NO: 2543 - DNA, 229 bp, Homo sapiens
atcccagtgagccgagttctgtgacttcttaggtagttgttagctctaccgtgggaccttcctctggggagagtaaaggccacttcctcctgtctgtcactgctatttgggtttattattgtagtctcctcagacatgtgttggagccggtatttatttgttcgaaggaaagaaaatgttaaaacatttgctttgttacaaaataaaagccacattttttaggaaaaaa

SEQ ID NO: 2544 - DNA, 235 bp, Homo sapiens
  misc_feature (1)...(235): n = A,T,C or G
tgcggaactctcatagggnggacaggaancangnactgacaaaaaaaagnttngccccggaccccnnacncanacactctctatncaccgggaacngcccgagtggaagaaaaataaacaaggaagaacgttccagagctatggaggcaaagngtggacagaggacagctnttttttngggngngggnncaccangggcnaatggacagaggcncactggagccactgggtacag

SEQ ID NO: 2545 - DNA, 108 bp, Homo sapiens
  misc_feature (1)...(108): n = A,T,C or G
gactgaggtctgcttcaattcccggcagccacagngcaaggagagaactgacccnggnagttgtcctctgatccctacatgtgcatcatanncctgacatggagacca

SEQ ID NO: 2546 - DNA, 251 bp, Homo sapiens
  misc_feature (1)...(251): n = A,T,C or G
gactgagaggacccgtattcagttcccatcggntcacaacagccgataactccagctcctacagcctcttctggacctggngggcacttgcactggcagagcacatnccccnacacatntaacttacatatncanaacaganntngtgtngtgannacaaatttnnanntgcctatgcatcctgggggctgggatcnanggagngtgccngcatgaccanttntgaatgtttctgtatatagctcactgac

SEQ ID NO: 2547 - DNA, 248 bp, Homo sapiens
gactgaggttcttgctgccggcttaaatccacttcaggatgcctgtgtagactgaagacaggaagttctacaggaatcaagcacaatcccattgccaaattgggactgctgagccagccagccttgtggactcaacaactaccagatcttgggcctttacatcataagatggccattgtcggactactcacaccatatcctataagccagtctaataaatcccacatatattatgttaaaaaaaaaaa

SEQ ID NO: 2548 - DNA, 149 bp, Homo sapiens
  misc_feature (1)...(149): n = A,T,C or G
ttttactactgatttctcaaggcttcaaacggctcgctggggatggggtgtatcccgacgggggagccattgcttaggctgctcaagcccttngattccgtttccagcactgcanaataaaagcatgtgagtccccccaaaaaaaaaaa

SEQ ID NO: 2549 - DNA, 189 bp, Homo sapiens
  misc_feature (1)...(189): n = A,T,C or G
actgagtatccaaccctgactaanacactacctgntgatggnncttcccnngaanngtaaatgatgctatttatagagctacagtcaagcaaagaagcagcagcagaggaaagagggaaggaggaagaaaagaatgtatgatggaataaaggaaagaattagaaggaaaaaggaagaaatgaaaaaaaa

SEQ ID NO: 2550 - DNA, 268 bp, Homo sapiens
  misc_feature (1)...(268): n = A,T,C or G
tttttttttttttttttttttgtttattctanctgcccaggcnaatggnaccgntcacacaccgnccacacactctgtctacgtgcnnggncnggggnggnaanggatctcatcttcatgatgctgnacttcatcttcaaagcaagggggcttacagtaagcccnnaatngatttctacccatccctgangactcctgccccaccaagcacatcaaattgactccccccaattntttttttatgaganggggggccacccttcccatg

SEQ ID NO: 2551 - DNA, 365 bp, Homo sapiens
  misc_feature (1)...(365): n = A,T,C or G
gaccactgactgctatgccanaggncctgaggtcaantcccagctnncananggccnnctnacanccattccngntgnnatcctacnccnncnnacnctgatctncncatacagcnncggngcgcntttgtagngaatgatncatgcgctggggaaacacagggtagacgtgaggcctgggaaactcctgctgtgggaagtacagaagtcccttcgctgggctcaccctcctcagtctgccggcatttctggaacaaggggaagttctgctgctggctgaagccccanataattccctgctgcaaatgaagagctccatattgacccanagnccaggagaacgtgnttacaggacaaaccctgtt

SEQ ID NO: 2552 - DNA, 105 bp, Homo sapiens
  misc_feature (1)...(105): n = A,T,C or G
acacctactcattgtcnntagattagacgcntnctaanggacatgtaggctcnatgctntccacatacacactaaaataaaatttaccgtgctaaaaacaaaaaa

SEQ ID NO: 2553 - DNA, 147 bp, Homo sapiens
  misc_feature (1)...(147): n = A,T,C or G
gcctcctcctttggcggcccaacagaagccacctcagcattctgaggaatcacagctgatttcttgtgaacattggangatgnacnncagaccaattaaaattgccccctgctgacaccacaaaagactgnctcctgaggacccctg

SEQ ID NO: 2554 - DNA, 240 bp, Homo sapiens
  misc_feature (1)...(240): n = A,T,C or G
acttacaactgatggacagacacggctnatttnttggcagancgactggcacgcctgngtagaccnncttagnagcanttctcctgagancntnacngaagaccccttcctccanatttctttaaatcttgaaaaaaactatcatagcatgtcttcttttgtacataaaacgtctgaattccattcccttccccaaaagttcagctgttacagaataaaaggctacgaggaaaaaaaaaa

SEQ ID NO: 2555 - DNA, 520 bp, Homo sapiens
  misc_feature (1)...(520): n = A,T,C or G
gactgaggggaagaaaaattgaagaagaaaatatcaatgacaaaagatgacaacatagtgaaagaaaccaccaagaaacagagctggctgatggatgggatgcaggattgaaatgagcagaagtgtacangctgncnacactgcccanatgaagacatggtatttgatgaaaaggaattnctcacccatgcttggtccatcaatganaatcatagnnaagtcttnaatgaangannacagangngntgnctttcaatggnaggagatgaggaaaatgttccttgtgctgaattgcttgacttgctaacactgtacagggaaactatntgaatgatttctncanaagtgtcancagacaaatgattgnanaacancttatatgccatgccagtnatatagtattttctaattttctttaaataaagaggccaccttcctatatttaaagtaccggaatgngtggcccactcctcatacatgtaagcattttgggaagtcttaaatcaaaataagatgtctg

SEQ ID NO: 2556 - DNA, 224 bp, Homo sapiens
  misc_feature (1)...(224): n = A,T,C or G
gaactgaggctgctttaaaaaagaaaggtttggggaaggaagacgtttgactgacagcaattctgttcaccttcccctgagatctgctatcaatggaacctcctggtctgcccgcattatctttgcttgtgcacaatgcccactgggctgagattaggtggngtacgccctcatctcttacctatggacactcgaggatgagtgtatcatgttcagatccctgg

SEQ ID NO: 2557 - DNA, 113 bp, Homo sapiens
  misc_feature (1)...(113): n = A,T,C or G
agactgagggcggagagancctgcctctacccanagnctccacgtggactacagctnccagnagttccttgctgaantcaaanactacaacntcctgccgagttcccggggct

SEQ ID NO: 2558 - DNA, 129 bp, Homo sapiens
  misc_feature (1)...(129): n = A,T,C or G
gaactgagcctacgagtccnncatnggcgcacactgaaggcgcgccgntcntgntgnaagccnggnacnttcctaactcacaggatccatgcacaaaataaacngagatttaaccgtcaaaaaaaaaaa

SEQ ID NO: 2559 - DNA, 156 bp, Homo sapiens
  misc_feature (1)...(156): n = A,T,C or G
gtgacaagcccttgccgagtaaccgcnnttgcatcatcaccgtactccatncagggacgtggctatgtncatntggntcttcttggccgnggatgggcancnggttgtntagncattctgncaaaagcnatcnctctggaatgtctaggaccaata

SEQ ID NO: 2560 - DNA, 140 bp, Homo sapiens
  misc_feature (1)...(140): n = A,T,C or G
aggggaccacagccccaggccttctaggggggggaacaccaggnccccagcggagacccatgggatgagaatntttnnacacnacaggnnaggcnagccccacnggagggggaagggagccagccaaaacaacaggggag

SEQ ID NO: 2561 - DNA, 154 bp, Homo sapiens
  misc_feature (1)...(154): n = A,T,C or G
aattgattggaaatttgntgaagtgggtaggagataggctcttacnttttacgaagaatatgatatagngaacttcggcatggtnacgctananatagtngagngngncttctgtcacctgaactctttgaggacagttaaaaacatattatgc

SEQ ID NO: 2562 - DNA, 217 bp, Homo sapiens
  misc_feature (1)...(217): n = A,T,C or G
ctgagaggccgtttcagangccagtatcaactcgaatacgaaatccttctgcaatctgggccccatttctagttataaagacaagaagacncagcatgttgaaaatgggcacttagccatggaaacatttgctgtagtgaagccaaataatgaacccatctctataggtcagaggccagcgacgtgctccatcccaaacacgattacctttgcagaa

SEQ ID NO: 2563 - DNA, 427 bp, Homo sapiens
  misc_feature (1)...(427): n = A,T,C or G
ctgaggaaggcctcatganccctttaacgaccccgcacccgtncaagacaccaagccaagatggagcccgtttctgggcggtgctnncaagatggctagagagaagagatgacagagtgccaagaaagngaacgaacatgaggggatgtgggcncctgcttctgcacaccgttgtctntccagtgcacagatgggaccagntagacccagctgtatagcaggccangtgtccctngnngagcgcagctggagagtgacaacatccctgcttgcctcgtgtagtagtcagagctctagagagcctgccagagaccgccagatcctacccaatgacacagacctgcaacttcatcccgatacactgagttcgggttgtgccttctgtgctttccatttaaacaggcaaagtgtttgatgaaaaaaaaaa

SEQ ID NO: 2564 - DNA, 292 bp, Homo sapiens
  misc_feature (1)...(292): n = A,T,C or G
ttccagcatccacctggtggctcaaaactacctgtgattctaaagacacctgtgattctgattcgggtggatctgatgccctctcctgatttcctagattatcaggcatgttctttctggaaatgtatacatatgaggtaaagcactcacatgcgtacaatgaaaacagtctgaaaagttaataattaaaaattgctattgcaaanctgctgannngggaccgaaactcagttttaataccttgtaaaaatgggtatggcagcatgactgtatttgacattggacgatgaag

SEQ ID NO: 2565 - DNA, 245 bp, Homo sapiens
  misc_feature (1)...(245): n = A,T,C or G
ggcctggatccatatnctacntaaagaggactctggctgctgtgcgtgcgtgcctgcgggagcctgcccctggagccacataagaaagggcctaaaggactgcaggttcccagcagtccctggctgtcaggatttgggaacnnggaacagaggggnccagaaacccttcaatttataaattattctgngnctttcacacagaattttaaaggaatgntttcactttatgaattttaaaagaaaaa

SEQ ID NO: 2566 - DNA, 170 bp, Homo sapiens
  misc_feature (1)...(170): n = A,T,C or G
cttttgctaatgggatggtttggngatggagtactcctcctgaccgatggactcaaagaagaaaaggtaaaatcattttttttctcccctgtcntcctaggaaagcacaacaaacaacataggttgaaattaatattttttgagtttgattttcttaaattaaaaacaga

SEQ ID NO: 2567 - DNA, 451 bp, Homo sapiens
  misc_feature (1)...(451): n = A,T,C or G
tgcgtgtatctacttcnaagnctcgttatttcagncaacacccgtgcatggcttctgctcactggngaagttgcttgcngggtntagnaggagacctggtgnaanccctggccagagctgnctcgntcctctctgcttgttgacagtaaccaggcaacaggttcaggaaagacctgnagaantccagctccatgatcttgaaggactcggncccacccccaggttnncaggacatctcgagaggaacagaancatgggggcacancatgggggtgtgcncaggaagcagaggcncggcttacaganaancagaggttggngacttttacttggatggcnagatgananananccgccaagaggcgcacagtgcgcaccgtgctgtctgcaatgacatcttctggccacttntggaataactttcctttgaggaattggctttaaagaacgg

SEQ ID NO: 2568 - DNA, 252 bp, Homo sapiens
  misc_feature (1)...(252): n = A,T,C or G
catggtcgtacaaaagtananagaagtaaacnttatgaganganagagaatcctttgtgtggctntggctgncctggaactctctatgtagatcaggccatccttganctcacagagatctatctaccagcctgtgcctctggaatgctgggantaaagggacacaccaccataactactacatgntgctaagcaatgtgtttagaaaatattcctgcggggggtgggtatgggagacttttgggatagcat

SEQ ID NO: 2569 - DNA, 197 bp, Homo sapiens
gactgagccgccccgggactgcagagccttccacccacccagcacgctcagatcatccagtaaccaacccaggaagttcttgtaagcatgcatttcttagtcaacactgaatgcctttagaccgaggtcaaccttttcagctggtaccgtggtttacactgctggtgagttttgcttttatggttgaaaaaaaaaaa

SEQ ID NO: 2570 - DNA, 197 bp, Homo sapiens
  misc_feature (1)...(197): n = A,T,C or G
tctcagtactcggtttcttcngncttcttanatctacatggacgcagtaacttgagtccgttctgcttggtcganccctaccatccaacccaacgcaataggnaatccggncactgaaaccttcgctgnctaacatgnnaagtaatttctttcctttgtgtttagtatgaaatacattggcattccctactcaaaga

SEQ ID NO: 2571 - DNA, 478 bp, Homo sapiens
  misc_feature (1)...(478): n = A,T,C or G
gactgaggtcaactgtaattgctctacagttgtttaagaatctacctgtaagaaaccaattttactcaacagctaaaacgtgtaaagatgaactaaaacctgtacaggaccttctcataagctacggtgtcctgaaacctgacatgaggattatttttgtacataataaggtttggttgatattacaaatgatccagactttaatgggatctatgatgaagacatgantgaagatccaacgtatgagcccaatagccctgaagaaaaggctgtgtttatgaaatatgctgagagtataatgatgaagctgacattcagcaccgtccaaattcaacagcacgaaaacatctttatatttgagacagcctattggctttccaatgctataaagtacaaccaggattatctagacatttgacttaccagagactacaaaaaagactgtatcttcaaaaaaaagttattcaaaaacactttg

SEQ ID NO: 2572 - DNA, 207 bp, Homo sapiens
  misc_feature (1)...(207): n = A,T,C or G
ccactgcccacacagtataccntctatctaccccncaacttaatatgganagagcntaaaaggggctagagggatgnctnancncttcnaagntntggctntgagnnntatttccagcaccnaccatgtgttgcagatcataactgtggggcactgcaggcatgtggaacanagacatacatccagntgtaacaccaacaaatagaa

SEQ ID NO: 2573 - DNA, 337 bp, Homo sapiens
  misc_feature (1)...(337): n = A,T,C or G
ggaggcagtctctaccactgagccccattctncctcatggntgccctaagggactgagctacagtggaanaactgngccttctatccgagatgatnaggaaatggattcggagttnaagaatgactntgcttactcctacatatgcntnagacttgnttagnccatacattctgtncccagggccagttnacagtnnggcttgntttgctgngtagncnagggctccnaccggattnagngactcangtntgcatttcnaagagactaggcngcaggntccactatgcctgantcctatactggggattgaacccagagcctcgtgcacaaaaagca

SEQ ID NO: 2574 - DNA, 107 bp, Homo sapiens
  misc_feature (1)...(107): n = A,T,C or G
acaggacagtgatgctaagctactccttgntgcccnanctcanctcacagcctgnacgaggctntatgatgatgataggacacagagtcgctcctgaaaaaaagata

SEQ ID NO: 2575 - DNA, 239 bp, Homo sapiens
  misc_feature (1)...(239): n = A,T,C or G
attcactatgacatgttacagananctggctgtgttagcctactgtgctgcnancacntntgcctcgnggnctgagattgctttcttcctggactccattctcttccagagaatgccctagtcaggtnanacccagggacggaagcaccngaangactttttctttatagcttttactctttntaatcatctctaagaggaggnntagtaaccaggctctatgaccgtgtcactcaaaa

SEQ ID NO: 2576 - DNA, 126 bp, Homo sapiens
  misc_feature (1)...(126): n = A,T,C or G
catgtgattctgcagatccatttcancctcatccgtgcgttntcaggnnggacttaatgcaggcagctccannantcagtggggntnngacttantagcagnttggctccagctatactctgggaa

SEQ ID NO: 2577 - DNA, 472 bp, Homo sapiens
  misc_feature (1)...(472): n = A,T,C or G
agaaaccgatctcaagaggcaaagctaaggctacataacaagcagtcacgccctgaggtcccacgccaaggctggagtctcggagtgagaagcgtcagagagctgtaagccaatcaggaagcaagtgccagcatcctgagaaagtcctcctgtggccaaggccaagctgtcatgagttaccatctttgttccaaacgaactcaccttttgccagtgggaggggcttcagacgggccactggatccttctgnnatggtccttcacagaggagaggaacactgggaggtgtccaatgccctggtctgctgagccgtttctaagacatggaagaagcaagggagcactcgcatctgagaacaactgtgctacatcaggccccaggtgagtggtctgatcagactggaaggacagannaacagaaggacncannaagaaccagaaggacatgangatgaaggaccttgctgattga

SEQ ID NO: 2578 - DNA, 289 bp, Homo sapiens
  misc_feature (1)...(289): n = A,T,C or G
gactgaggacgtgttttagatgggagctggaactgagcagaacatctttagctgtcagtcactagctggagccaggaagactatatctgatgtcaactgccttgggtggcagagaggtagcagcnntgngctacacagatggaanagncatntgnncaggacntttacagacttccnccttcctcgaggaagccaccttggtctactataggctattagcaccccctctatccctngcgcaatctcttagtttncgcagctgacagaatanttcaacttggaaccgata

SEQ ID NO: 2579 - DNA, 175 bp, Homo sapiens
  misc_feature (1)...(175): n = A,T,C or G
tcctccttttctaagagagatgagagaagangacgannagangatgaagntgacctgaaanncagaacnagancntgagtaccatcnaaagacatgatnctgtctgcttcttcnccancgcacactcttgagcaagcaggctcttcttccaggcctggggaatgttctcctctgc

SEQ ID NO: 2580 - DNA, 397 bp, Homo sapiens
  misc_feature (1)...(397): n = A,T,C or G
actgaggtctttgagaaggatccctccccccccccctcccctacggcacaaacagaaatcgaggtaggttgggatgggtctgtaatttccgggagggtgctgagaatatacctggagtctttcaagcgtaaaacgaancaagatgagagtagatttttgatagggacttcagatganaggtaaatttacttaaaagtttttgaaatgtaaacgagaattctcattgtaggagtccatttctcttatctcgctgcgtaactaagccttaaaagagaacagttaaggtttttcagttactaataatgggngaaagagaccaactttgaaactcgtaattattttacttaacctacttatgtactcaactatgnttcaaacccagctttaaaaaaaaaaa

SEQ ID NO: 2581 - DNA, 398 bp, Homo sapiens
  misc_feature (1)...(398): n = A,T,C or G
gactgagggagagccgnnccatcaccattgccgatggaaacacttggcattnctgtgaaccgagtggttgatgnattcctcttgccagtcttcncccttgtcctggagatatgtgagccntcacctntacaggattctccctccttctcaggccgacatctctgggctngantccatctctcgncttcctagagnggcatcttcattacttnccaaggctcacgcactggactacccctnnatctccaaagctcaccaaaagtttcaaaagagccttcgttgtttattgggactgggtgatgaagagaagggaagaagaaatgtgtaagaatttcactctaaaaaactatcacgggcgactggggggtgnggatctggattttgattcgcaataaaca

SEQ ID NO: 2582 - DNA, 119 bp, Homo sapiens
  misc_feature (1)...(119): n = A,T,C or G
cagcccctaccggtgaccttggngnancatgagcgggggggatntgcatgactcganggatggnccacactntgncaggtcggataaaaggttgntcccccanacgcctttccctgaag

SEQ ID NO: 2583 - DNA, 212 bp, Homo sapiens
actgagcttagtgacacaggtgcaaggccatctatataaaaagggtgtccctgactggaagaaccaagacccccagatgctcctccatctgctgacgcgccaagataaagacagacggacgtaagagccgccagcagccttgactccaggcagtgctgcgattttaaaggagagcggatcccaaaataaaggtcacttgaggaaaaaaaaaa

SEQ ID NO: 2584 - DNA, 195 bp, Homo sapiens
  misc_feature (1)...(195): n = A,T,C or G
gactgaggtgtttgctgnatgtgaatagaggngcccatggggaccagagacgtcagatcctgnggngctgnagcnacanacgcntgtaagncacctgatgaggctctgtgtcctnatcctctggacgagcngnncgtcgagctnanccactgagctatttctccagcccctggaccagactgtcgctccaccctg

SEQ ID NO: 2585 - DNA, 131 bp, Homo sapiens
  misc_feature (1)...(131): n = A,T,C or G
gactgagggtggcgagggnccnaagtgaaagaaatatggagcttagaacctgagagtancngaaaagntanagncannncatggggataatttttcttttcaagaaggcanccaggagaagaacctgctgg

SEQ ID NO: 2586 - DNA, 105 bp, Homo sapiens
  misc_feature (1)...(105): n = A,T,C or G
ggatggcagataccagatgatctggaagccgaatggagggggtgctccagtgtanagaggcagatggttaactaaaaggagggattccacggtgaggctttcatg

SEQ ID NO: 2587 - DNA, 144 bp, Homo sapiens
  misc_feature (1)...(144): n = A,T,C or G
tcgcggtgtccctcctctgccttagnttcnaaagngaatgnntnngantgagtgggacgnacngngntactgcaaatttttttcgtggancntttgcagaaataggccatattctgtgctattaaacaagtcttaatataataa

SEQ ID NO: 2588 - DNA, 203 bp, Homo sapiens
  misc_feature (1)...(203): n = A,T,C or G
gctctacatgtatcagntgngccanatccgctggaccacatgcncagaaacgggatcttnnacagagacgttgtttttttnagantaggggtagtaaagcaggatgcccggaaactaggggacttnggcncatngccggagngnctattccaagcagccntncacagagtacatntctaccncgtggggtccggggccccaag

SEQ ID NO: 2589 - DNA, 322 bp, Homo sapiens
  misc_feature (1)...(322): n = A,T,C or G
aactgtgctttctaagttaaccgaggagcactggacatgaggcatcacacacagctccagcctcttcaggaggagttagcaccacagacttgaatctctcaccgggatgccggccacaccctcctcacctggtatctgtctgagtggtgcaggtcctccgtggcagaagagtgtggggaagccgttggagagtctccttccctcttgatggaagcagacaacaggagggactggaagaagaaaagaacacatggccccagaccaggttagangccctgagaggccccagcattacacctggggcaagcggaataaaaaaagg

SEQ ID NO: 2590 - DNA, 212 bp, Homo sapiens
  misc_feature (1)...(212): n = A,T,C or G
ccaccgcgatgcctgtccttggaaatctgngcatngncgatncttaccctgaagaatgctaatgtctcctccgggctttttccatgcggtggtgcagnggtgcacatacagctactgcctaaaatcaaaagaccggagccgagccccttcatttattgatctcctttaatctgcactttgttttgaataaagggacacctgttaatcccaat

SEQ ID NO: 2591 - DNA, 213 bp, Homo sapiens
  misc_feature (1)...(213): n = A,T,C or G
actgtggcaaacatgtgcngagancttactnnctggngacttagaacttgcncttatgccatcccatatttnnataaaacaggatcaccagtggaggaagacaaaaacaaactacaactntttgtctaaaataattgtattgtaatttaattgtaaagtagaaaaatgatttttaagctgtaataaagaccatggttatcaagtaaaaaaaaa

SEQ ID NO: 2592 - DNA, 186 bp, Homo sapiens
  misc_feature (1)...(186): n = A,T,C or G
gactgaggtggggatgggctgaggtaataatgtgggctgaangccatatnacttcttgcgtcnatgtgaanngtacgacaggnngccnngcngacaccnnnnntnctgtaccgngtacgcatatactcacatacacacattctctctctttaaactaataaaaattaaaatctaaaaccaaaaaaa

SEQ ID NO: 2593 - DNA, 174 bp, Homo sapiens
  misc_feature (1)...(174): n = A,T,C or G
ccatctcaacatgggncgngggaggagctctcgaggccacatctctncctgaggatcttngagcagtccgnaccatttgaaggatcacaagaaagttcaacattcatcagtgaaagcatgggacatgtgtgtcttagtttgngaagagacactgtgacctaagcaattctttaa

SEQ ID NO: 2594 - DNA, 129 bp, Homo sapiens
  misc_feature (1)...(129): n = A,T,C or G
gggttggggctgaggcagacctnggcagcaggccataatnanttnntgnggaactctcaaagggnggacagganctaanacangacaaacatgcnggcaagacaccaatgtacatgaaataaaataaaa

SEQ ID NO: 2595 - DNA, 182 bp, Homo sapiens
  misc_feature (1)...(182): n = A,T,C or G
aggacctgacctgggnggaggacgaggaagaggaanaagaacaggaggaagaggatgaagatgaggatgcaccanatatccncttgaggaganacntgngaaacaagtcaaanggntggctccccagatgcagacgagcntagcaaagaataagaagggggaaaangaagaggatgaaacag

SEQ ID NO: 2596 - DNA, 143 bp, Homo sapiens
  misc_feature (1)...(143): n = A,T,C or G
aactgaggtactagcagcctacttcttcggnctgctggtgtctactgaagaccagcagaggcgtccanacgcacggactgagcgacttctggattcttggaccttctgttcgtaattgntggagtagctgaccacagtctgct

SEQ ID NO: 2597 - DNA, 128 bp, Homo sapiens
  misc_feature (1)...(128): n = A,T,C or G
gatacctagtatctcttnaggacgtagntaagagacctgaattacttnnnanaccagtactanangannataagcgctcctaggagntgtaccgtgctggtgttagttagcattttttttgagaggat

SEQ ID NO: 2598 - DNA, 263 bp, Homo sapiens
  misc_feature (1)...(263): n = A,T,C or G
acgccggggtcttagacttgatcctcaacacancactntatgcctgccattttntccttggngacttgcttcacgctcaggaacccattaagcacanctttgactgatanttgannannattaacangcatttatatcatagatgtgagccaattatagatactttaaatatttcatatgtntatantatttagatgaaatgaantattaaatattttatattatattaaataaatactaaacntattttaaagtttacaata

SEQ ID NO: 2599 - DNA, 213 bp, Homo sapiens
tgagcgagtctgccttagtgaaacatcgtttcaccttttctgtttccagcgagtctgccttagtgaaacatcgtttcacctttgtctgcttccggaaaacacagcttcatggatctgccccagcaaaacaccatctgacacaactgacttttcaaagaaccctaagtttccactttaagtgttacataaattaggagactggaaaaaaaaaaa

SEQ ID NO: 2600 - DNA, 114 bp, Homo sapiens
  misc_feature (1)...(114): n = A,T,C or G
aggtctggacaggaancagccgnantgntagcanacctgangagccacacncctgcncctttctantggaccanagattattctggcgggaancgggacccctgccccttcctt

SEQ ID NO: 2601 - DNA, 152 bp, Homo sapiens
  misc_feature (1)...(152): n = A,T,C or G
tgggcaccggccatattacttcttgcggantgtgaaaggtcggacaggaagcnnggcngactccanatttnatgtacnnannacgtatatactnacatacacacactctctctctttaaactaataaaaattaaaatctaaaaccaaaaaaa

SEQ ID NO: 2602 - DNA, 304 bp, Homo sapiens
  misc_feature (1)...(304): n = A,T,C or G
actggctaccggtggatcacacgganaaagttcatagaggagagcccagtttgacacantcatctggatgtggnncgtaagactaactgcngaggantgncccnttngngaacancctaatgaagagagggnncgataagactctcaaggtcagcgccagacttgctttgtaatctcataaaaattcatgagagcggcgatagccgagatctgatacgnttagaatgagctatgagccgatgtgtggatgagtaattttaatgaaagaacaacnaatncnnaccagggtcacgaactcaaattt

SEQ ID NO: 2603 - DNA, 229 bp, Homo sapiens
  misc_feature (1)...(229): n = A,T,C or G
gactgagaggctggcagtgcngntctggaaagnctggaactgcactgngtacctgagggggnccatnccncacntctgcctctgagngctgaacatgccctgccacactgagatgcctcgagccatgttcaaattangttgtttgctgttattcttgggttttaggaatccttcacagattttgtatatttatcccttatcaaatataatacaggatttgcaaataaaa

SEQ ID NO: 2604 - DNA, 166 bp, Homo sapiens
  misc_feature (1)...(166): n = A,T,C or G
tcggagtgcgcatatgnccncaccaagatgattggtcgacntcgtgnctggcaaccatcnttgtctgctanntgaacnnctgcncaacacganggacgtggctggccttcatgtagacctattgtttnaggtcgctgtggtgttctncnttcaccgggatctagtt

SEQ ID NO: 2605 - DNA, 342 bp, Homo sapiens
  misc_feature (1)...(342): n = A,T,C or G
cacctgccaatcccttgcttaactatttagctccactatgtgtntgangctgtatcaagaatattacgccaacngccaaccgacttcatcaggctaaagcgcaggacttatgaaccagctcctgcctttatctcagagacacactttatttccnnggggncacgggaaatgtctttcctctcgccctnttcagggagggcagcccatatttgtgatagtttgactacatcatcacattccggntctccttcatggtctccagacttctttcacttagaaattcccattctgatttcccctgtgtctttttatcgctgaaaagattngctggatggaaaaaaa

SEQ ID NO: 2606 - DNA, 244 bp, Homo sapiens
  misc_feature (1)...(244): n = A,T,C or G
acgcgtgccaggctcttgngtggtcatttgattcccacnaggtgannnnaatanattaggcanttaggaccacatgctaacaggacagaatggnaaangatggaaggtcacatgcttcccagtttgtctggaaggtcacatgcttcccagtttgtcctgcttacgtatcggatgagacgcctgtaggcctctgggttactactacaacactcataaaatactgcttntgtgcacaaaaaaaaaa

SEQ ID NO: 2607 - DNA, 171 bp, Homo sapiens
  misc_feature (1)...(171): n = A,T,C or G
gactgagggcacatgtttntggatatggnaaactactgaagagctgtgaggaagtcatgatgtgctttgctagcaaagcacagcagtgggcacggaagacggcgtcctccccacacactacatgtcaatcagagatactccatggatcagacgtgagctcccaggtaatgg

SEQ ID NO: 2608 - DNA, 229 bp, Homo sapiens
  misc_feature (1)...(229): n = A,T,C or G
gactgaggtctatttgantacaaggcantggaagactttgctcagaggaaggtacccaggagctgctgccanagagccanatctcgcttcttcagctnagcaccgtggaggtcgccatgcanctctccacgagttccaatgttgaattcttccacaacattgagcctaatgaatacataggtgatttatttaaactcaaataaaaaaccagcttagccaacctgataaa

SEQ ID NO: 2609 - DNA, 142 bp, Homo sapiens
  misc_feature (1)...(142): n = A,T,C or G
ccattgtctttataaggaatttttaaaatcagtgagtaanggtggcaattcangagnccccattgtntatctgggatatcaantggcaagtgactggacaagtacaagattctgacctccctgtnttctttaaaatgcaacc

SEQ ID NO: 2610 - DNA, 213 bp, Homo sapiens
  misc_feature (1)...(213): n = A,T,C or G
gactgaggagctcactacctngagccctgcctggtgnggaactcancagaacagcctgccntaaccttatcatagcantgctgggtnnacaccgngngacngaccacagtacctgcctacctgntctcctgtgctngncacgcttagaagtnanaaagcctggacgggctgctggggtgtgatttnanctggtctagacccgcccttccttag

SEQ ID NO: 2611 - DNA, 150 bp, Homo sapiens
  misc_feature (1)...(150): n = A,T,C or G
tctcctactccatgcttgatgacctgaacaacagtcaagacnctgggcggggacttgcttgcatggccctcancgagatcacctgagtgtngcccgcatnngtgagacctgnaagtgcacacactcctttnnaccttgggaactacctgc

SEQ ID NO: 2612 - DNA, 250 bp, Homo sapiens
  misc_feature (1)...(250): n = A,T,C or G
gactgaggctcaatgacacccttcgctgatctgggcccttggtgagtttccgaagcanannctgcccttggattggngctcgctcncactggcccnctnctcatgccnncaagttctangaagcanganagngacctctnacctcatgaaagcnnngggacnggttactcactgtgaggcctcatatggctttagctatacaaagtcaacaaaccactttacagcacgtaggttttggtttttgttgatg

SEQ ID NO: 2613 - DNA, 252 bp, Homo sapiens
  misc_feature (1)...(252): n = A,T,C or G
gactgaggacgtgcatgcgtggntttccagtatctcagntgntgacttgcttagatgggaccgacagaggataatgacatcaagaaccctgctgattagggccagtaagacagntnagccagnanacactcnacgtgcaagcctggcaaaccgagatggatttctagaacctaatgaactccgtaagagctgccattttacctccaagtgtaccctgtggtatgttctnacacatacgacacatacatgcta

SEQ ID NO: 2614 - DNA, 144 bp, Homo sapiens
  misc_feature (1)...(144): n = A,T,C or G
ctattgccttttgtcgagaggnggngntgtcatanccgtctctccacaacagagttttaaacataaanaccctaccgattcacnaactncacctgangtgcaagtgtgcantcccttaaganngctggtttctacttccctttt

SEQ ID NO: 2615 - DNA, 270 bp, Homo sapiens
gactgaggctttcagcagctccccttgccctaccagagtccaaggagatggcaattcgaaccgcttggattaccaggtttcattaggtaagggcgactgatgcaaggtggcccaaataaccttcgtgggacagacacggcttttcgaagccagcagaagtctcgccaaattgaaccgatgtcagatgaagttctgtgaatatctatgtccttctctttggcaccagagaggactaattaaatgctcgtgaagtgctttgaaaaaaaaaaa

SEQ ID NO: 2616 - DNA, 452 bp, Homo sapiens
  misc_feature (1)...(452): n = A,T,C or G
gactgagggtgatagngagccaccttcttgtggaggaaggcnatgggttcctgttggtcttggaccagcagcctttcactcatctagggacacatcacctaatctcncangcaaacactggctgcnccagcttcgatttctgatctttntggacccagaagaccctgccccagcctggacccagnactgnagccatgatggaagaagacataggagacacagagcattgncgacatgtgntccaggagctaatgcaagaggtgaaaccctggcacaaatggaccctcataccagacaagaaccttcttcccaacgttttgaagccaggatggacgcaataccagcaaaagacctttgctaggttccactgtccttcctgctctcgaagttgggcatctggccgagttctgatagtcttccacatgcggnggngggagaagaaggccaagggg

SEQ ID NO: 2617 - DNA, 160 bp, Homo sapiens
  misc_feature (1)...(160): n = A,T,C or G
gactgaggccccttcaggaagctccaggcacctgccgggnaggtggaaggacatctcctttgaggctccgncacactgccctgncctnatgnggtgggccagtgcangtccagatcngncangaccacacngagctgcgtntcttcactaggcctcctgt

SEQ ID NO: 2618 - DNA, 190 bp, Homo sapiens
  misc_feature (1)...(190): n = A,T,C or G
atcccacaggcatcccacatctnctttaagaacaatanaccctggacttggctggggtcaagaacaagatgccttctggattcctgaagatacagagggtcaggaaactcccaatctctgncctctttgggacccaacagggtcctgcntctatagaacactgatttatggaatatcccaaaaaaaaaaa

SEQ ID NO: 2619 - DNA, 322 bp, Homo sapiens
actgaggtggggtctttactggacatgtcagatgacccagcgttagattcacgatgactgcagctaatctgggagatgcaggactggacaaaggaaggatgagagcgaagtgtgctgcccttggcttgggggagagtcattctgtaacatccaaggaagaggctgcctgctctcccagtcaacagcccagccctccccaggccagaggagcttcaggcgcccacagcttgctgtcacagctattcaactcatcagatcctgtctggactttctgctctccaggaaactcaatacagaatctagtttcccacacaaaaaaaaa

SEQ ID NO: 2620 - DNA, 213 bp, Homo sapiens
  misc_feature (1)...(213): n = A,T,C or G
ctgagtcacttcccagcagccagaaccggacatagctacagctgcctgagcctggatgcacctttcccggntctaggcctcgacttttctacccataaaacaggtggccaccacattcacctcaaaggaactttcgaggtttgaagaaggtcatanagaagcccccatggctggctcagagctcgcttcctcctcagaagcacgcttccccac

SEQ ID NO: 2621 - DNA, 231 bp, Homo sapiens
actgagaggtccaaaagtatggtattagattccatgggaattggagtacaactggttgtgaacagccacgtgggtacagggattcgaacctgagccttcttaggaaccagtacttttagtgaccggccctctcctcagccccttgttgaagtcatgagctacaaaacaagaactggttttaatgagggtgatggcatgcctaaatacaccaagaaggaagaggaggaagag

SEQ ID NO: 2622 - DNA, 132 bp, Homo sapiens
  misc_feature (1)...(132): n = A,T,C or G
ccaaacgacaggctagagacacaccatggagatgctaggnaatcgaaactanagccttttntgagagngggggntggcannagccgnctctccaccacaaagttttaaacataaataccctaccgattcaca

SEQ ID NO: 2623 - DNA, 142 bp, Homo sapiens
gactgagttccggagctttgacatcttcttctgacctcccaacctcctgcacgtatgtggcacacacaaactcacaaacacactgtactatgaataaaataaacagatcttaaagaagtaaaaacacactgaaaaaaaaaaa

SEQ ID NO: 2624 - DNA, 195 bp, Homo sapiens
  misc_feature (1)...(195): n = A,T,C or G
gactgaggtggggtctttcaccgcttcgtggtgccggtagtgcgtccagccgggaagcgtctcggngacccattacggcccgggagaagtagccgngcggtatnaggngggccgggtagacttanntcttcgctgacgcggtttcattgctggaggtttgagtattaaaatcacacgcgcccagacaaaaaaaaa

SEQ ID NO: 2625 - DNA, 191 bp, Homo sapiens
  misc_feature (1)...(191): n = A,T,C or G
gatgtgcaccacgccccggcttggccancatctctcacttgaagctgnatatctcctgccctgcacgaacancagcntgagagaangagaactgggacagaagaagacaactagctcctgcangttntcctgacttccacacagangccatagcatgnacatgccctatcaccatataaatagatttttga

SEQ ID NO: 2626 - DNA, 177 bp, Homo sapiens
  misc_feature (1)...(177): n = A,T,C or G
agggagcctgtctgacccctgtgtcacactggatggttttacagaggtgccccacctgatgctggatggaagtcatcaccctacagtgtgggtatcaaggggggagcaagggggctaggaagctccanagggattaggtggtctccagtcactcccctctgtgtgaaccctgctgct

SEQ ID NO: 2627 - DNA, 208 bp, Homo sapiens
  misc_feature (1)...(208): n = A,T,C or G
cgagacctcatccgtgncaccccatantggcaatgcctantntccctancaactgagctnagctgacncattatnaatgcnaagggatactangggnngntaatgaangcntacgctggtactattaaaaagggaatcaaccccccttcccctccttcataactgcgtgttggaatagtaaaattgagctttaatcagaaaaaaaaaa

SEQ ID NO: 2628 - DNA, 102 bp, Homo sapiens
  misc_feature (1)...(102): n = A,T,C or G
gcgataccgttgtgagccactgnnccatntctcacacagcagngctcaaattagaaacccnggttggaanaaggtatccttcccaggcagaggctgacaaat

SEQ ID NO: 2629 - DNA, 345 bp, Homo sapiens
  misc_feature (1)...(345): n = A,T,C or G
gaaaagacggctcctgngacacgcggctnaaccaatanangacacgacttgggaccttccagcaacanatgnacatntntntggcaacgcaactgactgctgagctttgnngaaagtaccatgacagtgaggnaagcataatgtctaactagattaattaattgctgttcaaatggatgttattactctcaaattgtactacccatggaacagttaattgactgtacaatctcttgccttctcaactcttaccttaactctccctactactctgcctttgttcttcctatttctctaggctggatattttcttctgataattccactccactataaattttcaca

SEQ ID NO: 2630 - DNA, 433 bp, Homo sapiens
gactgagactttagccgcacctccctccctgactcagcatggaggaaaagtcagaagactgtaaggtcccagaagatctgttcaatggtctgaaagtcgcagatcctcaagaaggagagtctgccagccccatggtttctgatcccaagggtcagcactgccagagcaagctgccgaaggctgctgaagcccatccacaggacgaccatgttgaagaggaatgttttcatgactgtagtgcctcgtttgaggaggaacagccaggggcgcacgtggcagggagcaaagccagcgatgattctagttctgaactggatgaagaatacctaattgaactggaaaaaaacatgccagaagaagagaaacagatagaagagaggagagcgctaaactaaaggaggaggggaatgagcggtttaagagaggagattac

SEQ ID NO: 2631 - DNA, 252 bp, Homo sapiens
  misc_feature (1)...(252): n = A,T,C or G
caaatacatgagagatgcaagtgcataacatggccaagaacatgaccgccctgtcagctgagcatgcgtgctgggaccctgggttgccaatgtgtactgcatgggaataggggctccacccgtacaaaggatgtgggcctctccacagaccatgcnngnctctcccagattgtacatccaagaggtgccccatgtntgatccccacctgttacccttgagtcaagtatggaaaaaaaaatgactgaatggta

SEQ ID NO: 2632 - DNA, 475 bp, Homo sapiens
  misc_feature (1)...(475): n = A,T,C or G
gcagacgccatacttactncttgtggaactctnagnggncggncaggaagnaanatangccnccnnntcggtcaccctgaagtctgttctctccacccaactcactgccaggaagcccggtccttctcctccctgtacttagttttagcccaggaagaagagtggtagccttgcagatagaccctgcaggtagggaacacacttgacatcctcccaagacagatgcctctaccagatgtggcaaatgcacagggcttcatacaccccaggattacttcagatggagccccaacacaaaatcatattgcacaaccctcgacgacgacgatgatgatgacgacgcagtgncaaaggctagactatctccttcaggcttgggggatggctcagagggtacaggtacttgcctccaaggctgatgtcatgactccttgggtcccacctgatgggaaagagagacctgactcctgcaaga

SEQ ID NO: 2633 - DNA, 212 bp, Homo sapiens
  misc_feature (1)...(212): n = A,T,C or G
attctgagcagaccctctgnnnncgatganntggntcactggttgtnagcacggcaaactgancangcaaaggatggaggcttggtttctagcattcattctaggccgctcacaaccacccgagacaccagtttcagggactccgacaccttctgtcctttgcagtcacctgtatgcacatgatacatgtacccataaaataaataaattaa

SEQ ID NO: 2634 - DNA, 262 bp, Homo sapiens
  misc_feature (1)...(262): n = A,T,C or G
atgacactgctgctgaggccaagagctactacatcaggagtaggaagaatacaaaggggcgtgaagcagtatctnanaaaggggcactanttangangantngctgaggagctcggngnccagctgaacgaagacannanttnannacactcatctactnttggtctngccttctatgcanctggttggttgggcanggatgagntttttaaggcctccattaatcntnaggacnagaaacaaantgggtatgaaccgtctg

SEQ ID NO: 2635 - DNA, 107 bp, Homo sapiens
  misc_feature (1)...(107): n = A,T,C or G
tgaagagcgacgaggtggaagagcnagtatctccaccacaaagttttaaacgtagntnccctacccgattcacaacngcacctgtcgngcaagtgtgcagtccctta

SEQ ID NO: 2636 - DNA, 218 bp, Homo sapiens
  misc_feature (1)...(218): n = A,T,C or G
gagactgagcttggacagcatacagncagcagttngaancaaggccagtttcttgcctggtggcagcttgncacatttgaagcaaactccacaaggatgntcttcaatgntcattancttctttgaaattgcangggggtactgncagaatgtgacatgtctcattgtcaaaaaagncttaagctaataaaacatctttaaatgccaaaaaagaaaaa

SEQ ID NO: 2637 - DNA, 134 bp, Homo sapiens
  misc_feature (1)...(134): n = A,T,C or G
aaagagatgcgccggtgtncagactagaannttattggaaagcagtagggggccnaagacgtctntccactcacntagggagnannatanataccctaccgattcacaactgcacctgtcgagcaagtgtgcag

SEQ ID NO: 2638 - DNA, 152 bp, Homo sapiens
  misc_feature (1)...(152): n = A,T,C or G
tacagacttgccatctcnagaactacangctaagnctgtgtgccgangacctantctnttatnggcatcanatcactngnaactggagccaaaaacanctgtgagtcaccatgggagatgctggccaattgaacctaggctttttttttgag

SEQ ID NO: 2639 - DNA, 152 bp, Homo sapiens
cccctacctccccaaaacatagctcctcattttccttctccctacccagaaggtccatgggatcaacaccgggacccccctcttaccaactgtgccaccctgagtaggttacctatgactttggacctcagttcaaggacaatgccaggcgt

SEQ ID NO: 2640 - DNA, 222 bp, Homo sapiens
  misc_feature (1)...(222): n = A,T,C or G
tcttaactgctgagcccnaactccagcaccttggtgggttagggngtgnggnagangacattctgcagggcacggnaggccctggctcaggaaggcacccnttttnttagctggggganggctctcgtgaacgcaaggtgcctgcctccccgnatcagntcgcttggncagctctnggggggctnggctgtgggctttgccctngggaagcgctggctgagg

SEQ ID NO: 2641 - DNA, 168 bp, Homo sapiens
  misc_feature (1)...(168): n = A,T,C or G
ttggctctctggcctcantgaacatttgaactcaccaaggaagcttttcaaagattcctccgagtgctgagcacacaggccgtgtgtgcaagtgtgngtgtnttcccttgggagtttagcatgctgnacacaccatggcagtctatcnagccattccccagtcatttg

SEQ ID NO: 2642 - DNA, 166 bp, Homo sapiens
  misc_feature (1)...(166): n = A,T,C or G
agactgaggactgatttgtagagggaaggtntgcgcattnctctcggcggctgctggngttggtggnctgatttatgccttacagatctccgtgctcggntgtnctanctggttccagnatatnagattcatgttgctgattnggagcacatgaaatacctcttaa

SEQ ID NO: 2643 - DNA, 299 bp, Homo sapiens
  misc_feature (1)...(299): n = A,T,C or G
tgttggcggtgttgtctcnctcttctcagaggtggaagcaacncngnntngtacgnctctatgngtacaccgggacgannnanncggccatnttcctggtgaggccttccagaaaactcctctgaggtccagtaggagtttgattaatggtacttttagatcatcgagggtaggaccccagctctgtcctcatacagtggctctcagataccctgctcttgttcacgtttannggntgaaatcagaangaactccaaaagatgtgattatactatagcctattaatatttactaaagat

SEQ ID NO: 2644 - DNA, 148 bp, Homo sapiens
  misc_feature (1)...(148): n = A,T,C or G
tggacccttagctcacccactgggctagactggtggccagcaagacccaagaatntcctgcctcaacctnaganctggatgataggggctcactgctgcacctgactttttcacatgactgcttgggaatcgaacccaaaaaaaaaaa

SEQ ID NO: 2645 - DNA, 134 bp, Homo sapiens
  misc_feature (1)...(134): n = A,T,C or G
tgcgccttctagaaatgatggggacnctncacccatgttacccaaacagtatgnttgnctanaacaagaccctgttcaagtncntcaccaacngacatgccaattntggaaaggaaatcccccctggagtccct

SEQ ID NO: 2646 - DNA, 325 bp, Homo sapiens
  misc_feature (1)...(325): n = A,T,C or G
gaactgagaccttttcactgaggccgttgngntnggctgacntcttgtntctggnctntttnaccaccctgaccttcacagnggctcctaangatgacagcaggnattccctgctggncagnaggntccagctcagggaggccggggccacctccaaggaagctgagacccttccntttctaagncagtgaccatcagngcctttcatnaaagccaccctgagcagcccatgcgctgctggactcccactttagtacggaatgtttgaaacatcngaaattnataaattcccaaatcttgaaactgcatcattaaataaaaaaaa

SEQ ID NO: 2647 - DNA, 291 bp, Homo sapiens
  misc_feature (1)...(291): n = A,T,C or G
gactgaggcctcataaancctgccgtgcccgctccagnngccanancacatgcatnacagntnncacnggacgtgctatccantcacaggctnntggcatgncccaaatgccctgctttccagantaaacactctttcattgcttaaaggccanattgggagaaaacacanttttgaaagggatccaaaactaacttttgactctngatcagtngcctcangttttagggttgnatgaanaaccanatancaggcaaataagnacctgcttcaaaaggtgaaaaaaaaaaa

SEQ ID NO: 2648 - DNA, 167 bp, Homo sapiens
  misc_feature (1)...(167): n = A,T,C or G
gaactgaggtggggtctttcntagcactagngggcagcnatggcctggctgatgcctgncacctgntgttgtcatcggatctcaccctactcacacaacccctggagagaagaacatcttggaaataaatgtncaggntctggacgctctaaactgaaaaaaaaaaa

SEQ ID NO: 2649 - DNA, 309 bp, Homo sapiens
  misc_feature (1)...(309): n = A,T,C or G
gactgagtttgtctgtgctaagagccctgtctaccagccagcccatttagaacagaattcgccatatggacgtgagccaggagttcctaatgaactggagcaaccaaagaagaagaagaaagccggcaagctgacagaggctagcagtgggaaatgtagatcagcttttacctcctaattggtgaccttcagcaaaagaattctttagagtttgggggatgcagctcagttgttgcataccantccagtatgccccagaccctgggtgcaatctacaccaccatctaagaaagtttcaactaaaaaaaa

SEQ ID NO: 2650 - DNA, 212 bp, Homo sapiens
gactgagatgcaacagagggtcactaggacagggggtttggagaggcctttaccatcacagttcacgtcggctaactatgcgtgttgcttcatgttactatgtgcctgaccaggcacctctgggaaggatgcatgcccccatgctgtctccatttattggttgaagaaatacaaggactaaatggtggccttaagaatgatcttaaacaaaa

SEQ ID NO: 2651 - DNA, 300 bp, Homo sapiens
  misc_feature (1)...(300): n = A,T,C or G
actgaggattagtgaggatcctcnaggaaaaccancangttccatattntntgnanctggnnctannntaaaggcgggnagncnttcatgaggctgntgncattccgnntggggccacgggccaccaagctcctggccacacggnctatcccggtgttcagtgggtgcaggaggtcttctggaccaccaacgaccatcccgaggagcagaagcggagtcagctccagttatntggaagagggggnctttgcctggtggaaaacccacngagnnttcacaagtccctgggacagctttttt

SEQ ID NO: 2652 - DNA, 139 bp, Homo sapiens
  misc_feature (1)...(139): n = A,T,C or G
gatctatggagggcttctcatgtttgangtngggctttttacccctggaagcaagggaaagagggggagactgtttcaaanctgtggagatnctcctgcatgtctgcttcagagtcngaggttcttgtatgcttggaat

SEQ ID NO: 2653 - DNA, 117 bp, Homo sapiens
gatgcccctgaccttcagcagagatcctgggctcttcctccctcccttggagcctcatcttttctcgcttaaattaccactcctgaataaagtttttcagagcttgaaaaaaaaaaa

SEQ ID NO: 2654 - DNA, 379 bp, Homo sapiens
gactgagtggcagagtcacagttgttggagatacctcaagttaagctcaagatgcctgagacccatgatgacaagaaagacaactctgccgggggtaccatgcttcagagcacaaggcagtggcctcctgtgggccccagtggatccctagtccatgaagaccccaactcatgttgaggctggacccgggcacacaacacacattctggttggtaagatggttgaggaggcagaagagccttctacaaagcctcatgacctgactgagattccccaggactcacatgcaagggctgactcctgcaagttatacaggcatacaccacctctacccaacacaaataatgtaaatagaataaagatcttaaatcaaaaaaaa

SEQ ID NO: 2655 - DNA, 379 bp, Homo sapiens
  misc_feature (1)...(379): n = A,T,C or G
gactgagggtttatttnctcctatcctctggacctgtggtgtcggcccatgacggatacngtgancaactncctgaaagccaccaantgtgtgttttcctgagacctgnaaggaagganaagagcagaggctgagaanatgctgngactcactggatcctctgngtgagggaatgctgggtctcaccaggatcctctgtgttcatganagtgttttatgaangctccactaactgaagattgcagtaagagagacttgnttacccccangatgacnctngnatatgttcncatctttgnctgntcacatctctgtccgttcacacgctgagaggacctttctccagaataaatgcctaggctcttccaataaaaaaaaa

SEQ ID NO: 2656 - DNA, 295 bp, Homo sapiens
  misc_feature (1)...(295): n = A,T,C or G
gactgagagggtgcagtctggtgtggcacaatgctggaggaatatgacatgtactgaaaagatcagagtcagagacatctgtagtcaccatcctcaacacctccactatgtaatctgtgctttgccatccttccaacatcatgggatttaaacatggcgtccagattccatctgaagagttcagagcctggcgtttctcacggccatcataccatgcttctgttactgcagtctaagcttanggagccctatcacactgttggctcaactcaagcctttggggtcaaataaaacc

SEQ ID NO: 2657 - DNA, 129 bp, Homo sapiens
  misc_feature (1)...(129): n = A,T,C or G
cgtgcctgttgactctgagcccagggttncctgnttcagattggtantccctggttactaaanangacaccnantaannangggcccacnctgncatggaggcagagagataagggaggcccctccccc

SEQ ID NO: 2658 - DNA, 143 bp, Homo sapiens
  misc_feature (1)...(143): n = A,T,C or G
gactgagatgcagtttcagcatccagcttcctgctcctgtagcctcttcagctaccacatctttctcactaggacagantgacgctctcaaactgttagacacaataaaccctttcccatcaacctgtgtttaaaaaaaaaaa

SEQ ID NO: 2659 - DNA, 186 bp, Homo sapiens
  misc_feature (1)...(186): n = A,T,C or G
gacagattatattctngccggtaataggaactcgctgcccacttccntnatgananggcgncccaacaagaaaatttgagccttgatcnggctaanctnanacaaaacaagtaccaaggnaagnngaggccncnngagtagggacangatgagggaacactggctttctatcgctactcctgacat

SEQ ID NO: 2660 - DNA, 531 bp, Homo sapiens
  misc_feature (1)...(531): n = A,T,C or G
gaactgagaatctacccaaagccctgctgtggaagtccatcagctctcaaggttgctccttcaggaccatagtgtcaatcctgctgaccgctcatcctgggcatcttctctcactcaagagaatggcaaattggcctgcaacttctcagagaccccttcacaggacagccactcccacacccctatcggacttcccatgctcagttctgtgcctccagaaacctaggtgacaggaggttgggaggggcgaggctcggctggagcctgctgagactgatttgcctcagatttccatagctatcttggttccaccagctgggatttttctacccagctcctcttcagttccaagccccagagagccagcctccctggaggtttgcaaggtttcaggcaccgngggccaattgagctccagggttgcttgcttgaagtgattactacgagcctataatgctaagatccctggaattttatttgacaggtcattgagtttagtatgaaatttggtatgaaatttgggcttggcca

SEQ ID NO: 2661 - DNA, 174 bp, Homo sapiens
  misc_feature (1)...(174): n = A,T,C or G
tagggctgagtatacctgggcagaggccatantnacttcttggggaactctcanaggntctggacaggaancatggcanggttgcatanatgaagagccanacantntgcanctttctantgcaccagagantattcggggggaattcggntcccctcccccttccttaataac

SEQ ID NO: 2662 - DNA, 149 bp, Homo sapiens
  misc_feature (1)...(149): n = A,T,C or G
gagactgaggtgggacagggctgagnataaccngggcagaagccnaatnacttnttggggaactctctncgganggacaggaagcatggctngttcgcttncacnagaagccacacnattgttgcgttacttgagagatcgcaaaatga

SEQ ID NO: 2663 - DNA, 266 bp, Homo sapiens
  misc_feature (1)...(266): n = A,T,C or G
cctgagcagaggtctnttnacnncattgtggnctnctcaaagntccngacaggagnatnntatgctnncatatggnggntgaaaatatganntatgacatactaacagtagtgcctggttgacagtggtgacaaagctgactgcactgaagcatcaggtgtttgtttatacaggaccaagacaaacacacttaagatagagagcattgattgcatcgncagctcactgtttatataccaccagcttactatggtccatacttaaga

SEQ ID NO: 2664 - DNA, 114 bp, Homo sapiens
  misc_feature (1)...(114): n = A,T,C or G
atgggcatgggtcgantggaaatggagctggattatgccnnggatgctaccgaacggcgtcgtgncctagaagtnggnganggaggacacagaagatctggaggcaggaggtac

SEQ ID NO: 2665 - DNA, 199 bp, Homo sapiens
  misc_feature (1)...(199): n = A,T,C or G
tggggcagtgtctgaccgaaggtccacaacaccgtaattgctttacccaaaagcaatctttttgagcaatcttttacccaaaaagctattttgcaggtgaatgaacatnggagtttgaccctcactgaaccccccctgaagcacacattntttaacatcggcccacgtgngctnctggcanccccaaaaccaaaggggt

SEQ ID NO: 2666 - DNA, 405 bp, Homo sapiens
  misc_feature (1)...(405): n = A,T,C or G
aggctagactgactcgcactgacacggntcttcattaactagcaacagaaggcttnctaattcggtgaatgcttatnatccngaaatatgcccaangttcaanggctacatanccnntttnanngcancctaaggctaccaggggttcacctnnnanccatatatgggcncaannncanctcctatntgacacattgccacctcccngttnagagcnaaataccccattgntgngntnggngctntattttcctggcctgttctatgggacgggtgaagcctcctggnagcagcatntcatgagccctaccttnattatcttttaacctgntctaatctggcctgattatgttggaaaacctactgaatatgatntgnaaaataaaagattcattcctttgacaa

SEQ ID NO: 2667 - DNA, 488 bp, Homo sapiens
  misc_feature (1)...(488): n = A,T,C or G
gactgagccccatcccccagctctccatgttttgggaggttacctgcagggaagtcaccaccatccctgcggggttgagactaagctatatttgagtggaatcatttctttggtctgctgttggcaccctgtctggggtacctgnacacatagtacgcccagagcaaggtgaggccacctganaagnagaagacactctgccagccacactgntccaggagcacggagcctacncccccagtcaccagggtnctggnagacacanagaagngctgnagtgaccttggttgctatcctannaagagtcaagctcccanagagaggccgctcgctcggatgctcctgcctggaggatnntgctcttcagggagactgggggtgggacagctagggcaaggggaatctggnggcagctgangagactcancatggaaactactgctggggnnttcattncttccttctagaactncaaactggcctacaat

SEQ ID NO: 2668 - DNA, 156 bp, Homo sapiens
gactgagcaggcagctcacaactgcctgggtctcagttcctggagaattcggtgctctcttctggcattcacaggcaagtacatgtgcatgctaacacatacatatgcagtaaataaaagtaaaatgttgaaaaataaaaatttaaaaataaaaaa

SEQ ID NO: 2669 - DNA, 133 bp, Homo sapiens
  misc_feature (1)...(133): n = A,T,C or G
aatgaacactcagctctttctgcantgccnggactntctgacngcctgnctacctgntgcngnagacgnnatgactaccatngacnctaaccttctagaactatgagtccnatattagacgctttcttttata

SEQ ID NO: 2670 - DNA, 141 bp, Homo sapiens
gttccaggggatcttatgccctcttctgaactccttaggctttaggcacacacactgtgctcagacatactcacaaaagcaaaacctccaaaatataaaagtaaaatagataaatctaaatttaaaatactaaaaaaaaaa

SEQ ID NO: 2671 - DNA, 488 bp, Homo sapiens
  misc_feature (1)...(488): n = A,T,C or G
gactgaggaataccggggattgaacttggttcatcaggcttcctcagcaagtcacccaagcttgggtcacctgagagtgtcttgggagtctttggttgattttgttttcagtaatggaatgctgaccaacacaggtaaggttnanaatatggaactaccaatccancctgatnctantcttcattanggtanggcacgctagcatttnctgntgaatgaatgnnaggtccacacctatagtgcctacacacactcaatagcatacatgccagccnnnggaccttgantgngcnacctccnnggcttcctnttctggnatagagtgaatcaccgagtttnaacnaggactgaaggaatcagtgnanataanaggnaccngactnggggtgttcttntataaggngtacctggggttgttcgtatttgatggcaaanatggggtagncatggctcaagatgggataaaagcccacacccagggcagtggt

SEQ ID NO: 2672 - DNA, 105 bp, Homo sapiens
gactgaggaaccggattacaaaggagacggcttcctgtgatgctcagctgtgattactttcaacattcaccctggatgttctcttcactgtgggaaaaaaaaaaa

SEQ ID NO: 2673 - DNA, 127 bp, Homo sapiens
  misc_feature (1)...(127): n = A,T,C or G
ctgtttttcctgtgcgcngtcgtggaatgggaagcacnagncnnccctgctgatanncngctccnttcctaactcacagganccatgcgcaaaataaacgagatttaacgtcatagcaaaaaaaaaa

SEQ ID NO: 2674 - DNA, 406 bp, Homo sapiens
  misc_feature (1)...(406): n = A,T,C or G
gctttccaccgcttcctccagccagtcttctccgaatgagcaaaatacaaacaagaggagcaagcaaaaccctccgaatgtgtcagatggacaccagagaacccgccccagagaggagctccgctctgtcaatctnntttgtctggtcnnnggaacaaagaggtgtcaggttcagaagtcaaatcctaaggaggccacagtagataaaccgtcagctggcagcactgagaacagaaagtcctaaccccaaagcagaggaagcngactgggggaagggagagcctaaagggacgggaaggaagttttgcaggcagaggcangggacagggtgctaggaagaggaaacggtgagcctggcacaagcaggtagagactgggagtttnctctggattcaagttgaaaggc

SEQ ID NO: 2675 - DNA, 313 bp, Homo sapiens
  misc_feature (1)...(313): n = A,T,C or G
atattatagtggtttagacctanaatattantttaagtactttgtataaaaggagcccttttatgcactctagtatatgctgagtagatctggcaaactcaggaaagagggacttaaagaaggacttttcaaagcgagtaacatctagctgatgtgatcaatttccagaacaggcgggagcctcttcacctggagtatgtaccactggcgcctctcccgttatcattacttggtacgtttaaggaactaaagtaactttaaaagttcaaattgcaccgggtggtggtggcgcacgcctttgatcccagcactt

SEQ ID NO: 2676 - DNA, 193 bp, Homo sapiens
  misc_feature (1)...(193): n = A,T,C or G
gactgagatagaagganaaggacaaaatcaccagcactggctgaaggtaaatatgtctttgggggaattgattgttgagacatatgtgaaatataaaataaatataaacctacattaagaaaatatcatttagggaaaagtttttttatatattgaagtcaatataaaacttactaaaagtataaaaaaaaaa

SEQ ID NO: 2677 - DNA, 344 bp, Homo sapiens
  misc_feature (1)...(344): n = A,T,C or G
gactgagggagaccagcaagccctctactgtatccatctgctcaacgccctcctgagaaagctagtgtgaaccggaagcaactaatcggaaagactcatgctttgagccaggagccaggagctcagaccagcatgtccagcggtagccagcactcttcagccgccagcgaaactggagcccagatgaattgtaaacgcagccccagggtacattccctgcaggacactaggaggatggatttttcttttatcgaaagagagtgggttccaggccatttattttgctcctgtttgattcacacagaaaggttagtantgacagcntcatcatcattattattatt

SEQ ID NO: 2678 - DNA, 132 bp, Homo sapiens
  misc_feature (1)...(132): n = A,T,C or G
ccaaggtaacggtaaccatggcaacctncaccctcacagccctgcttttcctggaggaaaagatgtccanggcatgaggacaaagctgctgcagngagcactggtcttctccangtggaaaggagacctggg

SEQ ID NO: 2679 - DNA, 490 bp, Homo sapiens
  misc_feature (1)...(490): n = A,T,C or G
gactgaggaagtagacagccatcatgatagaagaaaaggacctagagtgacagactacttcgttgtggcaggtctcactgatacatccactcttttggatcaagaaataaatcgtacagatactaactcgattggtcctaaagctccaatcacagacattgctgttattatcaaatcagctggggaaactgtacctgnaggctacacntgngtggaagccactccatcannactccaagngagcttgnattacggnggtnngangagcccanagcntntcctgtgctacaggagagggagagancanccgncccttacagatagtggagcgctatatgaagggaaagaaaggcttatgccangatgcgaagtgatccacgccacgccgccggccgntgtgccnatgncaacaataggncaactncttctcagagagtntttatcacctatcgaagggctcccccagngcggcccagaattccttggccgg

SEQ ID NO: 2680 - DNA, 135 bp, Homo sapiens
  misc_feature (1)...(135): n = A,T,C or G
tttttttttttttagggncccgtncaaagaaacaggggggggacaaccnncnagattncccntncttttttttnttcaggggntaaagncntctntaaagaaggcgcgcccggcgaagaacctcgctggcatctg

SEQ ID NO: 2681 - DNA, 115 bp, Homo sapiens
  misc_feature (1)...(115): n = A,T,C or G
actgagggtctggcggagagcgccctctatcggcagcggctggaggtcatcgctgagaagcggtngctgcaggaggagatcgnctgccgcgcgtcncgagctggaggaggagaaa

SEQ ID NO: 2682 - DNA, 272 bp, Homo sapiens
  misc_feature (1)...(272): n = A,T,C or G
gatgagatctcaactgggangaatccatcctggactcaactctcananccngaantagaactaaatatagangtgtttgntgnctctgtggntncngccagagaggaagaggccctagaagaananagcntncnantctnangtctgggccagctgcatgccnaacacntgcaggaagcagctcaaaatgtcaggattcatgcatggtcatctatgaaatagcataaangggtgtctattttggaactcagggactcttgtgtgaacaacgt

SEQ ID NO: 2683 - DNA, 317 bp, Homo sapiens
  misc_feature (1)...(317): n = A,T,C or G
cttctttttgtcatgaaggccttgtttgggggcccgtgganatgactcantcggtgaanccttggaggtatgaggccctgangtgtgctgtgtgcacacanacanagacnnnccccaacgnnactcactccatggacntgatggtcagacagggataaagaggcgctcctgtgctggagcacangctgttctagctgaaganccatcantcaccctgtggaccggtactcctgcttcacgggctctggcgccctcgtctggcctcagtgggcactgcacataaccctttacttatattngaaaataaaatatttaaa

SEQ ID NO: 2684 - DNA, 408 bp, Homo sapiens
gactgagctaggattctaacagcaggcccagctgtccctgtccttggggcttgcagacaactggatagctgagtgtgtgggtccacgagatagcttggaaagtaagggtgtttgctgctaagcccgatgacccagaattcacattacaaggaaagagaaccgatccgcaggagcccgtgtctgcatgcaggactctgaaaatatgaagctttacctgagcagagcgttcacaggatttcctctttgtctctccatacccaaaatactaaaagagggttcatgcctcacttaataaatgcaggctgggcagactttatacaggacctgcttttctaacagcagccaccaggtgagtgtgagtgttgcattaggaataaaacatatttggttgtgtgactaaaaaaaaaa

SEQ ID NO: 2685 - DNA, 197 bp, Homo sapiens
  misc_feature (1)...(197): n = A,T,C or G
gaactgagagcctgcctangtctaaggngaagagactcagcattagctgcnctgacaaacgaagnctcagaaacacccatcataaactntgttctctggttaagtctcatgangaacattttatncaagcatagcaagctgatanagggaaaatatgaaatataaggtgtgaatatcanagaggtaaaaaaaaagaa

SEQ ID NO: 2686 - DNA, 502 bp, Homo sapiens
  misc_feature (1)...(502): n = A,T,C or G
tgagcggacctgacggnctgtgcggcagacctggcaggaagacgcgctgcagctgcgctcgcactcggcttcacgcaagttctacttcgtgactccggacactgactgcattctgtggttgcgtgctgcagcccctgaagacaggatgcgcttccagttccgcttctttctggtttacagcctgtcctcggccatccggatcaccgcagccacccaggccactgcggccacaccaacaaccaaagcatcctcccgcgacccgtgcgcaccgggctcctacctgcaattctacgacggcccgcaagaggcgccccgggccctggggcctccgatctgtggcctgaccattccagccccattcacgtcctctgggccctggcttggcttgcgcttggtcactaggggccgccaaccccgggtggactttttgggcgaggtcacctctttccacctgggtgggttggggctcatggatagggagaggtgaggagggatagagcaa

SEQ ID NO: 2687 - DNA, 131 bp, Homo sapiens
  misc_feature (1)...(131): n = A,T,C or G
agtcaccatggagatgctgggaattgaaactangcctnttttttttagcagggggngncagcagccgncntctccaccacaaaagttntaaacataaataccctaccgnttcacaactgcacctggcgcgc

SEQ ID NO: 2688 - DNA, 102 bp, Homo sapiens
  misc_feature (1)...(102): n = A,T,C or G
gctggacaggaccacaccattgctgcctttaanaaacttnntnngggctgaaggggatgcctcagtgnttangaccatcaactgcttttacgaaagttccga

SEQ ID NO: 2689 - DNA, 444 bp, Homo sapiens
  misc_feature (1)...(444): n = A,T,C or G
gactgagcctgggccccaaggcaggagactcggtttcaggatcagctacagggagagttccagatcagcctgggccacgagagactctggaaccagaacaaatcaaagcagnnccttnctnttgnggntntcttncngtgntgcnnttttncaggacnctcncagnctcncagtcttttcngtgaatnatcctgcgagacctnctanttngggtatcaaattaacttcatgcccngngnctcttgnnggaagannagnctattgnccactancctacgtncagggcaaagggaaactgctgngaaaacctggcangtcttgtcnactgccaggantgctgccaacaaaggagaaagggcctgtcaagccctccccttgcgctctgnggagacagacagctcaccttgggtttcctcagacacatctgngggaagctgaagagtg

SEQ ID NO: 2690 - DNA, 115 bp, Homo sapiens
  misc_feature (1)...(115): n = A,T,C or G
agactgagccgtaccccggcccctgccgggtccttccncgtgtccatgtgcccagctgtgcttgnggaggtgctgagctggnaggacttctctgaancnaactccagccagctac

SEQ ID NO: 2691 - DNA, 137 bp, Homo sapiens
  misc_feature (1)...(137): n = A,T,C or G
agctttatatggcagtacacgggcctcgagcacaaagntttagacctctgnncctgangaataacaactgctgnnctcttgcgagagaacaanacccttagttcgctggttctacttcccttttaaagaaaaaataa

SEQ ID NO: 2692 - DNA, 278 bp, Homo sapiens
  misc_feature (1)...(278): n = A,T,C or G
gactgagcaggggactacgctntcaccaatccganncctanncgtgtcaccagagagcctcttgggcctgaagagtagctctcctttcccctcaccttgctgtacctgctctctaatgggcccaccaagatgttttcaactcgccttaatttgtgacctttgtttgttgttctgtggagctacaaaaacttcataaaactgcgtccatgttggaacgtacactgngaagnaaacttaananatgntgcgtgtctcaagcctatggtcactcacaaagg

SEQ ID NO: 2693 - DNA, 188 bp, Homo sapiens
  misc_feature (1)...(188): n = A,T,C or G
cgcccgggcagggcttgaggctctgcactgnantatntgagcagcgaaccaaggtcctggggaatcatnggaggaaaatcttcagaattnnncntggntgctttgctttnttcngnctcttncctggcaccattcaaaagtagggagggaggggcttgctcttcctccttccccacccctagttgaat

SEQ ID NO: 2694 - DNA, 150 bp, Homo sapiens
ggcaaccttcccagcctgcccctcatttccatctgcttcgtagaacaaagggagctggacaaaggtggccccacgtaccttctgcgagggtgcataactgaagtcaatgaaaagcgactaaattaaaaattatgttttacaaaaaaaaaa

SEQ ID NO: 2695 - DNA, 261 bp, Homo sapiens
  misc_feature (1)...(261): n = A,T,C or G
gaatatggaagcaaggaagagcnttcacattgaacaatagaatcactgagtattcgtcgtacaccatgtccatgatatgatgatgcccgaggacttggattacctncccttgnntgttgtccacagagattcttcancaacataaactgnataggattgcaaggaagaagcttgtccatgaacctctggnaatgatcagtgagattgctaatgagacatcctatgttaatntntggaaaaaaatttgccaccaacatccgg

SEQ ID NO: 2696 - DNA, 197 bp, Homo sapiens
taaggaattctctgcaagcctggggatgcagtgttccacactcaatactgctgctcacggggacagatcgttctgctctgtgagtctcagtgtctctaactcacactgaatagttcttcatagatgtagatttgatgatccctgttaaacattgtattatgaattaaatcacaaatgactactgaaaattaaaaaaa

SEQ ID NO: 2697 - DNA, 289 bp, Homo sapiens
  misc_feature (1)...(289): n = A,T,C or G
gaactgaggcttggatacctgaacatttggtcttgtgctggaggctctgctcaggaaggttatggggcctttatgaagtgcagccttgctagaggagatgtatcactggagatgggctttcacagtttatcgttttgcccccacantctctgctttctgcctgtggctgaaggtatattctctcagcttcttcatctggcctcctccaccatgcgcgtcctcccaccattacnnactcttcttctggaaccataagcccaaataaagtcttcctttcataaaaaaaaaa

SEQ ID NO: 2698 - DNA, 298 bp, Homo sapiens
ggggtctttaaacttgatgcgggtgcggcgcggcgcgggacgcacagggctgcgcgactccgcctgggacgatcccagtgccttctgtaacgggcgggttgctgtaggaaaaaacaaatccggcaagcctttctttagcaagttgacccatcctttcctttgcctacgcgagagtctgcattggttgccaagggatttgaaaccgagaagagaggacattgataattactgtcggtttttaattatatgtagcattgtgcttttcaaagaacatacttattgtttgcaaaaaaaaaaa

SEQ ID NO: 2699 - DNA, 522 bp, Homo sapiens
  misc_feature (1)...(522): n = A,T,C or G
gactgagtcgaatgtggagtctcacagggactctcctgtactaaggctatgggcagtggatgaggcaactgggatccccatggaatgaccttgtgccaggctctggccagaagatttgctgccacagatgaaggagcatcagggaaagtatcgtcttacctgcccgtcccccccacttgcgccccaaattaacatgtaaagctgaggatggaccttaaaaggttcctgtcatcccctagtatcggtagagggttagtcacttgaggagcagaagcaaactatcttatttaagtgtccggcatattcagatactacgggtctaccaagtctacactgtaaagaagggcttggccctcatgggaatcatccatccattatacaacggtataagggctttctggggtccttttgtcagtaactagctggcactctatgaggtatgttctattaatgaattctggcttaattattcttttaaacgtttgagttttgntttgagatagagctctggctggcctaaaa

SEQ ID NO: 2700 - DNA, 231 bp, Homo sapiens
  misc_feature (1)...(231): n = A,T,C or G
cagcatgctaagccggaatcacancctatacctgctnaaattcaaagncccaatcttttccagttcacccangcatctcaacnttcttcnccatggcccagatacctnagcagccaanactccaaggagttacaggctttttcagtgtgctttatgcagttgtgagtaacatgggggcagctagtgtgacttagcattgncagtaactactcagagacttttaaaattgta

SEQ ID NO: 2701 - DNA, 228 bp, Homo sapiens
  misc_feature (1)...(228): n = A,T,C or G
tggaggaagccatgaagaccctggagctaggccagggtacttgagtgaagccaggtnccagtcattggtgtctcccacctggacacaggttacgnngggggccaggggntgggngngatttttaactttggtacattccnaccanaatantnnctgggaaccctactggggcantctgaagggnacacctcttttnccangattnttattctaacctaaataatacca

SEQ ID NO: 2702 - DNA, 123 bp, Homo sapiens
  misc_feature (1)...(123): n = A,T,C or G
cactgaatccttcacagaagagtcatnnncnnngatgtgangntggagacctacaggaacctcaatgctgtaggctacaatatggcgaagaacatagntatncgaacgaacattcgtcaaatg

SEQ ID NO: 2703 - DNA, 153 bp, Homo sapiens
  misc_feature (1)...(153): n = A,T,C or G
cgctgcctggcacacngaagagattangggatgagtanggactagnaactgnactgccacagcgcangaattaggtacnnacnntnagtacagtaacacccacaactactcctgaaccttgtaattaaaggaaacaaaataccaaaaaaaaaa

SEQ ID NO: 2704 - DNA, 105 bp, Homo sapiens
  misc_feature (1)...(105): n = A,T,C or G
atatctactgccgagaatcgacgaannncgagctcaggtacccggggatcgaagnncctatgcggaagctccnatnctcnagaatacacagagaaaccctgactt

SEQ ID NO: 2705 - DNA, 155 bp, Homo sapiens
  misc_feature (1)...(155): n = A,T,C or G
acaaaactagtccagaganagctgaaaaagcaaanntaaaggcaaggtatcctntcttgggacgggngnaggnagggtcaagaatntttaacgaaaacantgcngaaagggccaannanannttgactctgggggactacaagatgggccgaaag

SEQ ID NO: 2706 - DNA, 116 bp, Homo sapiens
  misc_feature (1)...(116): n = A,T,C or G
tatgacttttatcagtantgganggaactagaanttttgtnctngcagacaccngtnnggntgaacaattgtgtngaagagtttattagattaaaaacatttgctatcttcccaaa

SEQ ID NO: 2707 - DNA, 138 bp, Homo sapiens
  misc_feature (1)...(138): n = A,T,C or G
tgaatagggggggggcctccnccntgacctcactgcngctatggttacctgcacactgtcagggccangagcaccncgcnnnattcccancattncnntgaacgaacagngctaattagacttggggaagaaaaaaaa

SEQ ID NO: 2708 - DNA, 500 bp, Homo sapiens
  misc_feature (1)...(500): n = A,T,C or G
gcactgttcttcgttgggcctttcagccttgngcagctactggggatgcggcaatgcctttgcctangcgnagggncctgncactgatacatcttcncaccctgancgatgntgctggttctgcnaatctcactcgaccctganagtacctggaggccttntctcagcctcccgttttatcctgtgactgcctgggagannagnctgctttattgantnncttcctgggngagagtgggaaggaagagctcaggatctagagntagctatncatcatggggggatcaagagagganctttnaaaggncttagtttttgcttcctgctggtgcgaggaaatgaagccnagggtttgcgaattgtaggcaaatgagctatacccccatcctgaggaacttttgtcttcacggcaganaacattttccaggggtattctgatttggagagcatanttggagggcntcagcttttaaaaattttggaagccggaaaaaaaaaaa

SEQ ID NO: 2709 - DNA, 376 bp, Homo sapiens
  misc_feature (1)...(376): n = A,T,C or G
cagatccgacattacctgcncataagtgcctgtgtcccaagtngtntgnncganganctganaatgnnntagnnagnnatnacgctntgganancntatcttgccngtnacacagnaatgactctagaagacannttggtggaggannagatgttttgtgcatggggnccttgaggaatacttnagattgagtcctgttcccgaaacctgtcaactgaagcccaaccccaggggtacctgtattnggaaatggccctcatgggggtaattacagtcaagggatattgaggatgtgatagagctggtgnccttccagaagaaaagagaccagatatcttctgttcatgcaaggtnatgcgaggccacgtcaagaaag

SEQ ID NO: 2710 - DNA, 347 bp, Homo sapiens
  misc_feature (1)...(347): n = A,T,C or G
tttgaggcaccatgcaatatgggttgaaaatntcaantaatccantactgnanccngctgnnctgnatangatcgatncganncacaggactctttaaacctctatcctctgtggtggctgctaaaggtgagtgctgagacatcacctgcggatgcctgtgtctgctaacagcatggtagtgcagaccaagtctcccaagatcacttgggcccctggccagcaggatctgattttgaaaggnggntgagcttccattcccccacccttcagctgangtgtcgngacaaatcttctctgaattgctttttattaaattgctagtgtaaagtgggaggaaaccataaac

SEQ ID NO: 2711 - DNA, 205 bp, Homo sapiens
  misc_feature (1)...(205): n = A,T,C or G
gtttttagcacagtagacaaacctttggacgtacctatttacaccagaaggtcataaatactagctgtttaccttacgctgcttactcgattagtaaacctggggaggacccaatgtcaacaattatatactgtntgatccttgctgcattatattacccttaacactcaatttttataaagcattacagaactctaaaaaaaaa

SEQ ID NO: 2712 - DNA, 267 bp, Homo sapiens
  misc_feature (1)...(267): n = A,T,C or G
gactgagaaactccctanatgatgagtcccactgcctgtagctaccactccatctacccagagatgattgagcttcccttccataaatccagacccagatgtgcaactgcctgtcaagtgtctccaccagagtgtcacccaggtcacttgttgtctccacacagcccctcatcttacagataatgtcctcaaaagacacattctgtggaggaagactgtgaaaaacaaaaactcccactgggtataaagacattggagaaactccga

SEQ ID NO: 2713 - DNA, 257 bp, Homo sapiens
  misc_feature (1)...(257): n = A,T,C or G
tccagctcatcttccatgatncccgggattgctatgacnggtcagcagtttcattgacaaaaggatcctcaccctggacaaacaggaaacacaaatcagcgcacagccagacaggcccagtttatgagctctcgttttttaggaagagtctgcgaagcagcacactacactgtagactgcagcctttgaagcttcaggttcaagtgtggtaaatttacttagaataagtaagtattctactcatgacaaaaaaaaaa

SEQ ID NO: 2714 - DNA, 114 bp, Homo sapiens
  misc_feature (1)...(114): n = A,T,C or G
gagtgtttaagggcgggcngggggccnattctcagtttacctcactttttagnatgtggcctcctataagaggantgancccaagantgaccagccctgacgtggcaagaagaa

SEQ ID NO: 2715 - DNA, 156 bp, Homo sapiens
  misc_feature (1)...(156): n = A,T,C or G
acttcactacactttgcaacagccgcggcggcagagcagcgtcaagcttcgtgagcaaatcctagatttaagcaaaagatacgtgaaagctctggcggaggagagcaggagcacggcggatgtggacagcggcgcgtncatggcaggctatgctga

SEQ ID NO: 2716 - DNA, 373 bp, Homo sapiens
  misc_feature (1)...(373): n = A,T,C or G
gagactgaggctgtttttgngttgcttgacgtgttgatcctaggacatagancggagaacaagaagaannctangacttaactnatgaagaatcccctatttgccatcttatgactagcatggnacatgtanttagaatcatatgcattatgggaaaggtcaggccaatcaaaatggagaacccagtcagtatgatggcctggcgcatacacaagtatctgctgacctgatttggatccttgaaacccccaaggtccgaagaagagaactgaatcctgccagttggcttttgacttctacatccatgtggtaacacacatgaaccctaacatatgtgcactcaaattaaataagtgtaaaagaagatctatta

SEQ ID NO: 2717 - DNA, 230 bp, Homo sapiens
gactgaggttttggatttttgagccacggcgtctaccctgaacagcccggaactccttgtgtggctgaggatggccttgaactcccgaccctcacaattccaccagccccttggactgatgcgtggattgtgatcatgcaccaccacaccaagttcacaaggcaccggggatcgaatccagggcttcatccccagcatcagtcattacaagaggcaggagagaccgtacc

SEQ ID NO: 2718 - DNA, 230 bp, Homo sapiens
  misc_feature (1)...(230): n = A,T,C or G
gactgaggtatttggaagactctgctgntgagngtgacttgtactgtgcagacctggcccaagatgtctcagngaagaagaacttcagtatctggcctagagactgtttttggtgaagaagatggttcagacccttgtctgaagagtctacctgagactaaagtaaagagatttatattaattacattagcaaaataagtcttanaaaaatcccagcagagaaaaaaaaa

SEQ ID NO: 2719 - DNA, 119 bp, Homo sapiens
  misc_feature (1)...(119): n = A,T,C or G
gtatgtagaactctgccctgctctctgcttactgcatggaagtttagaaataaaaccagagtgtcttgtcatttagnatttaagaagcaggaaggaggtgctgtgtgtgtgtgtgtgcg

SEQ ID NO: 2720 - DNA, 227 bp, Homo sapiens
  misc_feature (1)...(227): n = A,T,C or G
cgggtggaggccgganaaaagaccanagtccattaagtgagggaggctgacngaccaancagnngtacanngcnactactnccagcaagaccttcaagaggacttaaaagctactctccatcatgctcttgtttctctgtttacttccacctccgctaccaaccagcttactattttcctaatactctaggttctcaaatcttaaaactgtattcaaaacaaaaaaa

SEQ ID NO: 2721 - DNA, 124 bp, Homo sapiens
tgaaagagcatcagactcgaggacactcactcatgtgccctgtggtcaagactgactgcatttctcatctgtgatattacttggcctttgaataaagttccttgctactttgtaaaaaaaaaaa

SEQ ID NO: 2722 - DNA, 109 bp, Homo sapiens
  misc_feature (1)...(109): n = A,T,C or G
tgcgcctggacctgaangngaaggnctatagtcccagcttctcaggaggacanggctgggaggagttccgggtcactctgggaaatctagagactctcaaaaaaaaaaa

SEQ ID NO: 2723 - DNA, 123 bp, Homo sapiens
  misc_feature (1)...(123): n = A,T,C or G
gagggagcccatcctatggagccgtctagagnctgccgtcntgcanctgnggtggtggaggangggctcgtgncgctgaggcgatgnngatcatganataggaggccattctgtgctactagc

SEQ ID NO: 2724 - DNA, 257 bp, Homo sapiens
  misc_feature (1)...(257): n = A,T,C or G
gattccagaagagggacacaaagnctgtggaaccggagggacggnaaagctgctgnaagattgcatctccttgaactgtcagggaaactacagctatgaatcccaacattcatttcttaatgactgttgnccacaagccaccatctgctcttgtttggtcagcctcgggtcctttccatgtaaggnttaacactatatcaattttcttcttaaatccatttnaagaaaacnggaaagacccccccaaagaaaaaaaa

SEQ ID NO: 2725 - DNA, 291 bp, Homo sapiens
  misc_feature (1)...(291): n = A,T,C or G
tatatctaggtgaggcgaccganactgctggattcctttgcgaagggccangcctttaggctgaacaagtaaccttccntgtggttaatagagactggaaaaactccttccanaactctgaaggggtgagcttggttntgacagtgggcacttatgagccactgatgtatgccaagctntggacctangagntnnaaagcagntntnattcagnnacagtatagctttaggggccaagaagattccattgctccaaaaatactcaaacttgggacagcttcctggaagagg

SEQ ID NO: 2726 - DNA, 111 bp, Homo sapiens
  misc_feature (1)...(111): n = A,T,C or G
tagcatggctcttacacagaangagccaccctctgntcagacagcttntgntagccttatgnnanctggaaagctcctgggaggcataacgggggggggggcttaatattc

SEQ ID NO: 2727 - DNA, 424 bp, Homo sapiens
  misc_feature (1)...(424): n = A,T,C or G
gactgaggtggggtctttcngctactatctggcagtcgtatggcttgnagctcacaatgactgtgcttagagacatgggcttacaggagctggctgagcagctgcaaacgactaaggaagagtctggagctgtggcagntgcagccagtgtccctgctcatagtacagccagaacaggacactttgtggaccancacaggcnagcactcattgccagggtcacagaagtgnacggggtgctggatgctttgcatggcagcgtgctgactgaaggacagtaccaggcagttcgtgcagagaccaccagccaagacaagatgaggaagctcttcagctttgttccatcctggaacctgacctgcaaggactccctcctccaggccttgaaggaaatacatccctacttggtgatggacctggagca

SEQ ID NO: 2728 - DNA, 162 bp, Homo sapiens
  misc_feature (1)...(162): n = A,T,C or G
tggagtggcttttcctactnaaatttgttgacaacatttctattctaaaatttttccagcttgagggatgagaattggcattttgttcaagttgagaacagggcatggggaggaggttgacaaggaaggaaataaaatgagagacaactaaaatgaaaaaaa

SEQ ID NO: 2729 - DNA, 210 bp, Homo sapiens
  misc_feature (1)...(210): n = A,T,C or G
tgccggggcaaaccccacagccagggggaggnctttgtggacatttccccttcagcctgctttgatctcctctggttgttggccatggtgccagccttctcagtttctccaccctcagactttttagcacgttccctgtattgacaccctgtttctcggaagtagaagctcttcttacaactgcctccaagcctacagaccaccttccgt

SEQ ID NO: 2730 - DNA, 360 bp, Homo sapiens
  misc_feature (1)...(360): n = A,T,C or G
ttcgagcgtcggacccggngatctaagttcctattcggaagttcctattctctagaaagaataggaacattctnnacctgcaggcatgcanaagcgtgngggggacaangnntccntnnnaaaaatatgaacatgcaanccttgtcggtggcttgcataatattatctgatttttcttagaaaacagccttangatctaaagttncattatggcatcttnatactnagttangacctgntcccctcagagctgcctcctacccacctaccctttcccttgnccttccctcactagcccatcttgccttcctgaacctgnncnatngcctattnncctcctncctaaggaggcctacccgt

SEQ ID NO: 2731 - DNA, 124 bp, Homo sapiens
  misc_feature (1)...(124): n = A,T,C or G
tgcacttacaacaatggcagnnatgaaattggacctccacgagaagcaccaagctccagctgtcactgtcatcgagtaagcctactgtgcctttcctnaagcagtnggcagacactcaccattt

SEQ ID NO: 2732 - DNA, 292 bp, Homo sapiens
  misc_feature (1)...(292): n = A,T,C or G
gaaccccaggagatcacagaggagagaataccgctcttcattggagggtaggcctacctctcatcttgagaaacgccagaaagtgactttggttccacatgacgccactgagcaacctatctngagacagtctgggaggaataaataacggggcgcagatcttatnttttttacggtcgggngctcacctcctgttccatcctaagncacaagattctcacantggaaagancccttcactggacngcggaaaggaccagatcccatccttatatggggacgaggggtcttc

SEQ ID NO: 2733 - DNA, 265 bp, Homo sapiens
  misc_feature (1)...(265): n = A,T,C or G
cggccttttcccctactgggaccacccactaatncagctntactncctggagttcttggaatcttccggaagaagggaagnctggtgtcaagcatctgcnaacttcancatgccagcanncagtccggcggagggagggatctgcngntggggcaaccagangaccctgccctaggcggaaataaagtgcaagccccgccccagtcaccccgcggngggaccccaggcagtaaaccccaccccattcctctggcaaaaaaaaaaa

SEQ ID NO: 2734 - DNA, 190 bp, Homo sapiens
  misc_feature (1)...(190): n = A,T,C or G
attagaggcgtgataccttgtggaaganntaaaaggtaaaattgtatttacaggnangtnngccttttataaagcctatcctggntctactgnatnactatttncatngnaccggggnctacctnatnttagaataaagagtatcattgaatcatccctaactgntcctncagatcaactatgaattggg

SEQ ID NO: 2735 - DNA, 117 bp, Homo sapiens
  misc_feature (1)...(117): n = A,T,C or G
gtaaatataggataanattctgactnccggagnngnaganggagatgggnagcttcattttnnacacaggcgngggcctaggaggcgtcacgaaaaagaggcctgacttcccaacag

SEQ ID NO: 2736 - DNA, 138 bp, Homo sapiens
  misc_feature (1)...(138): n = A,T,C or G
gactgaggtatcagtnctcaggncagnaggtttggtggcaaatgtactgtcccatcctgtncttncacgtgctcccacaactcccagacaagggaccactatgtagccctaaagttcttanatattgacttactaaaa

SEQ ID NO: 2737 - DNA, 199 bp, Homo sapiens
  misc_feature (1)...(199): n = A,T,C or G
tcttgcctttgtagtggccncagagntcctggncgatgtgacctccagagaccaacgntgtcttttnttttganaacaggaacancanantcttaagcaggtctgacnttggattgcttccactcgcgaaggnanaaacnantggtcnctnngtacagagcngcttgaaataaaccttggtggtacctgcgatggtgca

SEQ ID NO: 2738 - DNA, 139 bp, Homo sapiens
  misc_feature (1)...(139): n = A,T,C or G
tccatagccaacatccacgtggcagctnacaagngnaaccccagtncctaaggatcccatgctntcttctgacctccaccagcaccaggcatgtgtgctacagagtcatatatgctcatacacataaaatatatttaaa

SEQ ID NO: 2739 - DNA, 129 bp, Homo sapiens
  misc_feature (1)...(129): n = A,T,C or G
ctttgcttttttcctgtgaaacatacntngncnacagangcgagcctcatnttntccatctgcaanaggagaaaggananaccacagcagcccccaaaggcttaanggttccactggaaggcacatggg

SEQ ID NO: 2740 - DNA, 157 bp, Homo sapiens
  misc_feature (1)...(157): n = A,T,C or G
tgctgcccaagcttgtctggctgngtgtagctcctacctcaagcngagtnggctttctcngctncctcaccagtgcctgacaaacagatgcattaggctngtgtcctcatngagagaggagaangacngagcagggatccctgggagtacagcgggg

SEQ ID NO: 2741 - DNA, 150 bp, Homo sapiens
  misc_feature (1)...(150): n = A,T,C or G
agcagggcagccagaatcacctancagaggagcantgaagatgancncaagacnangnangnccnggacagatacctaaagatgtatgcatctccccattcncgaatttaaagatnatgaacttagatttccccatttaaaaaagagagc

SEQ ID NO: 2742 - DNA, 498 bp, Homo sapiens
gactgaggcctgaggcacaatggagaaggaaagggagtgtccagaaaaggccggaagctggcatccagccggcggaggcaggcacgagagccagctgacggtcaggatgcccccgtggccgcggaggctgagtcctggccctctgatgctgatgcggagcttcaggacttcttccaggactgtggagccaaggaaaggggctttgttacccgggaggatctggcggtgagcatggggccctggaatcacacctggaatcctttcgtgcagattcttgaattttcctattctaaggcttagcttgcttgcttattccctcctgcatccaaattcactctcagatagtattaagaatttgtttataccaacacataggtgactgatgaggcttaaaatattaccctttcctggaaacatttgcattttaacaaaggagagaactttgtgccccagaaataactcaaatatagtgatgtgtgagtgttttaaaaaaaaaaa

SEQ ID NO: 2743 - DNA, 121 bp, Homo sapiens
  misc_feature (1)...(121): n = A,T,C or G
gcttaacggcaaggaanggagagcctgaaagtanagcnaggnanctacgcanaaagccacnccnggctacagaggctcatgaaccttncagaatcatcnaagaagacctgcccgtgcatgg

SEQ ID NO: 2744 - DNA, 283 bp, Homo sapiens
  misc_feature (1)...(283): n = A,T,C or G
tagtgggctggacctttctagtagcgngtgcnaagaaatcctacagagagangttgactatggtcatcaaatcttccctcagggntgggctttccttggngaatgcagtgaggctgggagagatcttctctttctagcctggcctttgctggctccccccatgctntgagtcgcccaagaacttcagctttcctagcaggctggggacagccncatctanttttctgtngggatacntcngcaattctcctnaagccagaangagngtgaacataccctgatg

SEQ ID NO: 2745 - DNA, 342 bp, Homo sapiens
  misc_feature (1)...(342): n = A,T,C or G
gactgaggctgagttcccctgggggaggagggctgcatccttcttcctctggtcggctaagggcttctgcattcatagagctgaacctacaaggtctgactgacaagaacggctccaacgactcagagtcctgctgtgagcctgagctagtgacttctctctactcagtccacaagcgccatagagtgggntcagcctnggttgtatctctncctanctgncatattacccactagggatgtctgcagacccagctgagatcctgnagcagagtaatggtgggccttcatctactgacatnaggactggctaaggngacaccaggattcccacagccctggt

SEQ ID NO: 2746 - DNA, 375 bp, Homo sapiens
  misc_feature (1)...(375): n = A,T,C or G
tgccactagcagccatgtanncttgcgccacagtagtgatcggtgntagtggaagaagcantatcagnngaacagaagtgccanagtacatnannnagattntattgagagcanncgtancaggaantaactgacctgttaagaagcaaccannccggggctgngccctgccagaggactaggaagcanagtcccatanagagaaggccacaaggggcccagagagcacaggtggngatgtctccacacccctagatgctggggactaagatggaactttctggtttctttaacagttcggttacatcgagtgatgtttttctggacgctgncttgngagaggcatgngacgttntactgaacataaacacttga

SEQ ID NO: 2747 - DNA, 431 bp, Homo sapiens
  misc_feature (1)...(431): n = A,T,C or G
gactgaggtgggcatggagcccagggctgtgtgggcactncaccnctgagctacatctccagcctccagctctctgctcttgagtctttnanatatattcccaanagggggntgctgngtcatagtcattctattnccttaggggannanggaaaanggnnaganacccanacagagacgaagaaacctanaaccagcaggtaccccagccacnctaaancccaggtgctcctcnnggaccggcattctcgaaatccttcactcctaggtcaagatccgnccccagaaacctcaccacccatttgnaccctcaaggctaccagcttcagctatttggacagaaccccttcattacgcaaaagagaggaccagaaggagactgtccagggngcagtccaggatgtagaaggngnggctgcttaaaaatttat

SEQ ID NO: 2748 - DNA, 275 bp, Homo sapiens
  misc_feature (1)...(275): n = A,T,C or G
agactgaggtgaggcganagagtgtagtgntttcacngtggaggagggctcacggatnggnagcnaagtgnnnacccttggnaaccgcntgcgangnggnacccagggtaantaagatccttanttgntcattcnntagacagattcgctggacattgtgcagtggaaatatttgaattagttttcacctcaactatttttgccttcactatggcttgaaattcacaccaagtttacagaaatggggtcacctactttgtaggcaaaaaaaaaaa

SEQ ID NO: 2749 - DNA, 122 bp, Homo sapiens
  misc_feature (1)...(122): n = A,T,C or G
attgcccagtgatagaagcccatttaagaagactacatagtgtctacttcggctctgngncntcggtactacaaggcacaactanantcgacancanaataaagctcagtagggtgccagga

SEQ ID NO: 2750 - DNA, 148 bp, Homo sapiens
  misc_feature (1)...(148): n = A,T,C or G
gtctgtctgtgcaccgngtacangcgnnggccgaaaganggcatcntatcacgcgtaggacttactagtagacatttatgataccggatgtcgttgctggaaananaacccaggctctctagangagcnggcaatgctctgaactgct

SEQ ID NO: 2751 - DNA, 196 bp, Homo sapiens
  misc_feature (1)...(196): n = A,T,C or G
gactgagcttggttccttttcctggcgaagcccagtagccctgagacagcttggactntgagactcattnctccacctattcctgatcgtatgatntggcgctctctagctctatgtantaaggttgaaccaggtngnattatnggngctntgaatgctgtcattctcgcactctcacgcttgctcaaaaaaaaaa

SEQ ID NO: 2752 - DNA, 104 bp, Homo sapiens
  misc_feature (1)...(104): n = A,T,C or G
tctatgacagtccaaatacctaaccctatgggactcctgtaagggtacagntganctgagggccattgcttccagctccaggaatcatcgtacgcaggtagata

SEQ ID NO: 2753 - DNA, 126 bp, Homo sapiens
  misc_feature (1)...(126): n = A,T,C or G
tgcctgtatgcacctgtgcccgtagcgcctgcgctatnagaatangacactgnaggcntggncctggagtacatgcattnngncagcntgcacctttgagccntcctctccagccccatgaatcca

SEQ ID NO: 2754 - DNA, 108 bp, Homo sapiens
ggattgacacggatgacagacaacctgccaaacttcagaaacctgggggacaaaatgcagtttctactgcagtgaaccttccttgagtatgaatcaacaaaaaacaaa

SEQ ID NO: 2755 - DNA, 203 bp, Homo sapiens
  misc_feature (1)...(203): n = A,T,C or G
gaagagaccaccacatggacagccagncagcnagagcaganntcacactgatggatgacatatgcccanaaagttcttcnattccatanaagttaanncatgctaactgtttttgataaatnantactttaanaggccattcnaganaagaagattgngttctcttatgctttggaagcctatcacctgcaagcaagctcttt

SEQ ID NO: 2756 - DNA, 182 bp, Homo sapiens
  misc_feature (1)...(182): n = A,T,C or G
gactgaggtaaaccctgcctgtggaatgcagtagtgattgacgctgtccacctcaaaagacgtcngaagcttcaaggaagatgtcccagggggactgtgctgtgaaacagatgaaacagtgaagaagagaagagttcgtgctatggcntacccatggacactgcctcccctgctatccgtct

SEQ ID NO: 2757 - DNA, 132 bp, Homo sapiens
  misc_feature (1)...(132): n = A,T,C or G
cgtcttccaggcagctnagatggattctgcttcttctaggcgagcncggactttgcanncntgncttgnggtgatgcanctgacncgagagacatttctgcncctgtaaggaacctcattaaaactcattgg

SEQ ID NO: 2758 - DNA, 184 bp, Homo sapiens
  misc_feature (1)...(184): n = A,T,C or G
acagtgaccaggtcaagactncggtgaagaaccctcgctggatagagacnntctgntactacttgntaaccagaccaataattaattacactagcaagccncctcttatgaagtncnctatcnngctagganttntttnctccaangggggnggattaaatatatacaactacgaaaaaaaaaa

SEQ ID NO: 2759 - DNA, 160 bp, Homo sapiens
tgaggatcctatacagtttatactgtactgcaacaaacacacattctcaggttactcctgggtatgacagtgtctgacttccctgtttatgatgacacaaagaacttgatcagcaccatcaagcattgcatagaatgttcctcaactggaaaaaaaaaaa

SEQ ID NO: 2760 - DNA, 392 bp, Homo sapiens
  misc_feature (1)...(392): n = A,T,C or G
gactgagggttcctgcaagcacctcgcttcagccctgccctgtcctcatcctccctgtcacctccccgaggggacagaccaagcgccagctgtggaaaacgatttatttcgggattagagttgatcttcccaagaaggcctgctccctcagggtgacagacttggagagcttgactcctggccctggatcctgccagaagaagctggccactggagtttaggacagctgaccagagctggntctnaatcactcacgtgcactgtctagngtgaagcaagcatgatgactgcccancaccctaacagacttctntacaattgggaccagagaaggcacacactgctcaaacggactgcacagaaccaggattcgatcctctgggaggatttgg

SEQ ID NO: 2761 - DNA, 210 bp, Homo sapiens
agactgaggcccagcaagaaacatggtcagcatgcatcggagctgcctggaagcagggacaccaccaggagctgtgcttccaggagaaaaggtcatagtcttgaaggccataaaaagagatacacaattgctcaatatcgcatgaatcttgttaatattcgttaatattaatgaaatataaaatgagcacttatacctcaaaaaaaaaaa

SEQ ID NO: 2762 - DNA, 289 bp, Homo sapiens
  misc_feature (1)...(289): n = A,T,C or G
taacgagacccctgcactcntantntgctcngnagcagaggncagannnacngagacagaagcattcngnccgntntcctgncanacaaaaccccgangangccttctttnttcctggaatatggaccangaggagtcctaccttnctaaagcatgctggcgtgcctataatcacagcactcaggaggctgatggaggaatatctgggttagagtttagtctgggctctatcaaaggagtctcatctcaaaaagtacagaaataaccagccttaccaactaaaaaaaaa

SEQ ID NO: 2763 - DNA, 141 bp, Homo sapiens
  misc_feature (1)...(141): n = A,T,C or G
gaactgctccccaccgtngaacatggatgntggctatacacgngtctgntgttcagaccttgncacaggagccactgcnaaaacatcaaaacagaagatntcccaagtgggaaggaagagctaacggtgtaaaaaaaaaaa

SEQ ID NO: 2764 - DNA, 261 bp, Homo sapiens
  misc_feature (1)...(261): n = A,T,C or G
gacttggggcgcttggngctgctgaggaggaggaggaagaagaagaagaagaagcaagtcaagtgggccaaagttccaggcaccccagttctaggagcagagcatctccagacctgctctccctcaggttgccaggacaccctgaaggcccatcaaagaacaggcaaagcacctttatctgccttccacaccccacccactctttcctattagctctcagctgtgccgnggaactcagtcattaaagagtgttttaagcca

SEQ ID NO: 2765 - DNA, 212 bp, Homo sapiens
  misc_feature (1)...(212): n = A,T,C or G
tttcctcattactatgnatntcagcttaaatgccattngcncntggatagaatgttcgccactacaactaattcctnacnntggnnnggnngctgccanttttnanggtttgcntggttgcctgcctctacccctttgatcactagctgcntccnggggatgaaaaanagctttggcgctaagcttntctgctatttctaaagaaaaagaaa

SEQ ID NO: 2766 - DNA, 143 bp, Homo sapiens
  misc_feature (1)...(143): n = A,T,C or G
gaggacatctacgtactgatannatatgcctgccctctacccatnctatttttaagatagcagactgattggtatagcataggccaaccttgaactcaaaaactttctgttgcaatacatttttgtgaattgaaaaaaaaaaa

SEQ ID NO: 2767 - DNA, 132 bp, Homo sapiens
  misc_feature (1)...(132): n = A,T,C or G
aagaggcaagcaggagatggacctgntggactntganntncaggactccatgacttgnaacnanattatgtgccaagncngaatngcntanaaattctcagtttataactttcttttgatgaggcgtcagac

SEQ ID NO: 2768 - DNA, 107 bp, Homo sapiens
  misc_feature (1)...(107): n = A,T,C or G
actgagaagagtctttctatacagtgntggctggcttggaactctccatctcacacctctgcctccactgggattaaaggtgtgcactaccactgcccccccccccc

SEQ ID NO: 2769 - DNA, 152 bp, Homo sapiens
  misc_feature (1)...(152): n = A,T,C or G
gctaaacagccctggcntnagngaccctccactcaagctactctttgttntgtataccttgnntgttgaaactgggactccctgngcagccngactggctnggagctnaganacaaagaccaagctggtgcaaantcaaaacacattgcttt

SEQ ID NO: 2770 - DNA, 172 bp, Homo sapiens
  misc_feature (1)...(172): n = A,T,C or G
agttaaggaacctgtatccttaggnggaacaccacagtggccgctcatctgccccattantgaacgacacaaccgtgcagggagagtccctaggtcctgctgtgtaataccgngccttaaagganggctgcctcttctaaggactgaagagtagtaattcgcaattaaggtg

SEQ ID NO: 2771 - DNA, 190 bp, Homo sapiens
  misc_feature (1)...(190): n = A,T,C or G
agactgagggctatctcaagtaggcttccgacctagatacaaaatacatcggagaacccttctcaaggaagactttatcaactatgttcaatatgaaattaatcttttggagctgatccagagaagaagagcaagaannaagatattcatttaagaaggatgagattggctattctatggtacagtcggg

SEQ ID NO: 2772 - DNA, 117 bp, Homo sapiens
gagactgattcaagagtgagcccctagctcccttctcctgctgccatgcctttgctctgtcaaggacccctggaacgggaagcctaaataaacttttataacttgcaaaaaaaaaaa

SEQ ID NO: 2773 - DNA, 101 bp, Homo sapiens
  misc_feature (1)...(101): n = A,T,C or G
cggtggctattgggaaatcctcaaacttcggntaagaagnggccttgcccnaanaaagttgcntcagaggnaccgggcaggantaggcagcctactttttt

SEQ ID NO: 2774 - DNA, 151 bp, Homo sapiens
  misc_feature (1)...(151): n = A,T,C or G
aagtacctgtgcctagccctgagcaccaggacatgcangataaagactctgaagtccngttctccttcgnnacgnnatgctangancatgggcttngtctatgcatatnactgcaaaaacagactaccctangnggtagtatggtcaggcc

SEQ ID NO: 2775 - DNA, 125 bp, Homo sapiens
  misc_feature (1)...(125): n = A,T,C or G
tgtgctgaaacagcatgactcggnggatgaagatgtttgttaccaaccctgangncctagacttccaccctgaagccccacagtaggtncngggacaagctgcaaagcctctgacttccacatgc

SEQ ID NO: 2776 - DNA, 149 bp, Homo sapiens
  misc_feature (1)...(149): n = A,T,C or G
catgacttttgccaggacggactttcctagctgtgtgcaggcgggtaatgggagcgtctaacaggccataaatgcttaagtgctttgtttcgcaggcattttcagtaaaggtcagaataaattcntcttcccttaatgcagtatttata

SEQ ID NO: 2777 - DNA, 153 bp, Homo sapiens
  misc_feature (1)...(153): n = A,T,C or G
gactgagatagacaggaaaatcaagaaagatgtctaagntaaggncatanagttcatgtatctatggtntaacgagaaattgttttaaatgttcagatatctaaaaaggattntctaagataaacttctggttttgtattattctaaaaaaaa

SEQ ID NO: 2778 - DNA, 181 bp, Homo sapiens
  misc_feature (1)...(181): n = A,T,C or G
gactgagggctgggganctcaaaaacactcttaaaaggaaggcgtggtgncttgntcctgtggctcccagcacttggnannatgatgcaggaggattgctataaggacctccnatatggcccaaagtganacctctgcctcancgtntctgcctnagnaggncctgacaaccttgtaaaga

SEQ ID NO: 2779 - DNA, 149 bp, Homo sapiens
accaagcctagtgatgatggcccatattcaattccccaggactcacatggtggatggagagtgccaactcccagttatcttctaacccccacatggataccctggcacaggcataccctggtacacacaggatgtatgtgtgcacatat

SEQ ID NO: 2780 - DNA, 267 bp, Homo sapiens
  misc_feature (1)...(267): n = A,T,C or G
tgtgcggcgttgggtccctgattnnnggtnatgaacaactccctgagattgttaagttggcnnngagagacagnagtcaaagggaagagatgagaaagggttgattagatggtcacaaagctgtncanctctgggaatgcaactcanaatngcaaacnntaaaggccgngtacaatcaccaaattgnaactttgcttgaattacaacatactgttgctagcttcctggcttgtaactgaggaaagaaaagattctgatgtgtaaaaa

SEQ ID NO: 2781 - DNA, 297 bp, Homo sapiens
  misc_feature (1)...(297): n = A,T,C or G
aggtgagagacccttgtttctgncnanatgncgagancagntactgggcctnncanntagctgccgagcctgnccacctgagtcccatcactgtgactccaccgggtggagaaagctgacttctgttaagttggcctctggcctccacctttgctaagtgctcgtgtacatgcatgggcaagcacgtgagggcacacacacacacacaaatgtaactaaaatgcttgtaaagntacanaggatagagatagagagctcaggggttaagagtacccagnggtcttgcagaggacctgg

SEQ ID NO: 2782 - DNA, 224 bp, Homo sapiens
  misc_feature (1)...(224): n = A,T,C or G
ttccaggaatataggatggctaaccattaatggaagggaaagcataagtctatcgtccattatggaggcagccttagcagacggagaacctgacagatcttcggtgagtagtttaacaacactaaataaggatatgtcatctacagctggagagtgctgatataagccagactttattctaaagcattcattgaaagcaaaagcttgntgctttggttgcttgg

SEQ ID NO: 2783 - DNA, 145 bp, Homo sapiens
  misc_feature (1)...(145): n = A,T,C or G
ggcagtatattccaccacaccncagtgccccttaccgaagcagtcgntcctgnggnctnggaagattanntcggnactcacccgttgtntggggattccgggcctttgcgggatntggcnggnttgcctgcagaggatattgttg

SEQ ID NO: 2784 - DNA, 132 bp, Homo sapiens
  misc_feature (1)...(132): n = A,T,C or G
gactgaggaaggatcgggtgacagttcaagacgagnaggctgaagcattgaaacagaaggaactggaacaagaagcaaaacgcatggctgaggagcggcgcaagtacaccctcaagattgtaaaaaaaaaaa

SEQ ID NO: 2785 - DNA, 208 bp, Homo sapiens
  misc_feature (1)...(208): n = A,T,C or G
gagaaaggcctgagctggtcagatgactnggctggataangatgnttgttaccagccctgatgncnngnnanncaccctgannccccacgtncnaggagacaanatgntagtctctgacttncacatgcatgcactttgnannaagtatgcaacaccccaccctaccaatgagagaatggatgaataaataaataaataaatttttat

SEQ ID NO: 2786 - DNA, 302 bp, Homo sapiens
  misc_feature (1)...(302): n = A,T,C or G
aggacaccgtagcatcttggtgatggnagnaacagaaanagtagctgncatgngagtgctgaaaagcggaactccatgttntctgcaggagcaccnagnnctattanncaccgagccaagccgactnctcagcntccacattcggaacattgtntcanccgtgggnagagctnggattcatggggctggagagatggctcaaaggtgcagntgtcnttttncatgtgannncnggcaccagggactccagngncctantctaatncccacaggcgnacacngccacaggagcatacaggcat

SEQ ID NO: 2787 - DNA, 300 bp, Homo sapiens
  misc_feature (1)...(300): n = A,T,C or G
ggggaggtactcatctaccaccgttntgncagctgtttgaatgnanntnttcatcaaacntggccacangccattccacatagtcaccaacatcccagagacagacctggaccgactacagattttaggagccaagngctttactgacgagtcactnctgngacccaacaataggcttntgaccaccctgcctcagcatcttagtgctggaantacngagagcaccaccatacnnggnttatgcnacgagagtcccagccttgccacgaggcggaagtgactgagctgccacatccttca

SEQ ID NO: 2788 - DNA, 103 bp, Homo sapiens
  misc_feature (1)...(103): n = A,T,C or G
tgagactgaggaacagctgctggtacagncaccagcatggtaanagctacanagggccaggctgcacttnctcctcccaagtccaatggagcccattgcagca

SEQ ID NO: 2789 - DNA, 195 bp, Homo sapiens
  misc_feature (1)...(195): n = A,T,C or G
aggagggattactaagantgaccaatccacagactgcctngcantganctnancntgatagacaccttatctcctttacttctaaccagnaccaanttcntnnnanntgntaagnccgctcttatgtagaagactatnatgctaggaatgatgctccaaagacncaggattaaatatatacaacctacttaaaac

SEQ ID NO: 2790 - DNA, 284 bp, Homo sapiens
  misc_feature (1)...(284): n = A,T,C or G
gactgagttttgaaanggactcttttatcagggagtagctgactacgatgttcggcctcttctacctgcctggcttgatgtttgtctgcacatcaagttccctatccatcatggcttccatggtgctcagtgtgagcctgcaggtgcatactgacatctcctgaaggcggcctcctgacaagtgtcacaccggctgactgcatcggggaacaccaagtgtgaagcactacagagagccaaaatgaatggtaaaggagatttctttgacacgctaaaaaaaaaaa

SEQ ID NO: 2791 - DNA, 210 bp, Homo sapiens
gactgagtgctgagactgacccctgggcctgctgtcctgtgctaggcaagtgatccctgcactgagccatacataccccagccctatctttgatcatcccaacaaatgagacgcctggatggtaacaacttcggctttggggaaggtggagcggggatctttgtggagaaactttgtattaacatattcaaatatgcatcaaaaaaaaaa

SEQ ID NO: 2792 - DNA, 294 bp, Homo sapiens
  misc_feature (1)...(294): n = A,T,C or G
tagcatcctggacaggggccataattactncttgcggaactactcaaaggtcaccacanncaagnatggcnngnntccatatatnnactgcctcgaataagatgaatncanagctcaggtacccangngatcgaagttnctatncggaagttcctattctntaaaaagtntaggaacttctcnacctgcaggcatgcaagntgngggggtcgatttttttaaggngggngggctgtttaaagggagaatcgaaggcggggtcnaacgaggangttttaaggggggagaagacag

SEQ ID NO: 2793 - DNA, 105 bp, Homo sapiens
  misc_feature (1)...(105): n = A,T,C or G
gcaccctcctgagacgaatntttctanagggacattngagacccctctctttgcctgncannctactgaaangatgaacgnnaagaaattacgggccaggtgtag

SEQ ID NO: 2794 - DNA, 118 bp, Homo sapiens
  misc_feature (1)...(118): n = A,T,C or G
gactgaggattgctctctgcagacganaactcnaggacncntgctgnttgtgtgnnngcgccaaccanggaatgacactcccctccttctccaaggctgcctacctctctataaataa

SEQ ID NO: 2795 - DNA, 130 bp, Homo sapiens
  misc_feature (1)...(130): n = A,T,C or G
aaacattctgcttctacttgtaaccagaccaatatcaattcacttggaagcnccnnnntcttntgtagnagactatcatgctagggaatgtttgcttccaaagnggcgggggattaaatatatacaacta

SEQ ID NO: 2796 - DNA, 130 bp, Homo sapiens
  misc_feature (1)...(130): n = A,T,C or G
ttgcaggctcaagtgatcattaggcaccagcctcccatttcagtggtcaaccttgncagcgtgtcancanagatcccaagannnggaataacagaaaattggaccccattaaaaaattttttttaaatga

SEQ ID NO: 2797 - DNA, 260 bp, Homo sapiens
  misc_feature (1)...(260): n = A,T,C or G
gactgagatgggatctattatggagtaaatcnngtcaacactgcgtagcgantctgttaacagncangctganngcccggccacgagtccggcccctgttgactttcattcctctgaatgcccaggagaaccatgggctggctgtgcccaccccgtctgtcccagaagattttgcagacaaagaagtgggaggtaagagaactctgatcttgtggcttcctttcatccctgctggggccctgaagttaaaacaaaataaa

SEQ ID NO: 2798 - DNA, 224 bp, Homo sapiens
  misc_feature (1)...(224): n = A,T,C or G
gagcctcaaccttaaaatgcattgnatattcccatcttgcccagtagggacggtagagagcaatggcgcaaacagggtgctattgcggtctaaggctaattaatcnctttacctctctgggcctgnntccccttatgttatacaaccagcagagtctagttcgtgcgntgcgncacagcctgggctacagggtgagacccccatctccatgaattaaataaatt

SEQ ID NO: 2799 - DNA, 402 bp, Homo sapiens
gactgagatccctctcttctgcagcatcaaatggaaggttcatgcactcatcaaagccagcagaacaaccctccatcctcctgctgctcatggagccacgctggagtgtggcacacattctgaagtagcagaagatgaggttggcgagctccaccatcacatcctgcatggccctgggcatgggacacaatggtggaatctcaccatgagttcagttccactgtctgcaagtcggaagctgtactctttgactgtatgtatattcatttcaaataaccacatccagaagcagctctaggaaggtgtaagagacatacggaaattgccagactcgtaccttaattatttggcacagccagttgcgagtttaggaaagaaaacaagcacatgaaggaaaacatt

SEQ ID NO: 2800 - DNA, 354 bp, Homo sapiens
  misc_feature (1)...(354): n = A,T,C or G
ctgagactgaggtagaaganagagaatagcaataactaacaanancangaaggaanaagacgacggagnangaggacgaggacgtnctntactatctatcagaccgnngngggcctncggntnaatngatcaacctctctccctctcaaaacaaatccttnccnngggccntgcaagatggctcactagataaaactaannctnntttgctttnncccttgcccctcccttcacctgntttntgaacctttntactcccanccctgggcacactcaccactctctgaacaccccatcctgaatagtttattttctctctacccaccanagggtgtncncactttcttttcctct

SEQ ID NO: 2801 - DNA, 189 bp, Homo sapiens
aaagccccacactgaagcacattccatggagtgagagacacagagattagaaccacaggaggacgaagactgcaggagcctatctgtacgagtttgctgacgacattaagctatacacccttctccaagtactgggctctttagaaacatccaaccatgaagggaaaaattaatatacaaaaaataaaa

SEQ ID NO: 2802 - DNA, 250 bp, Homo sapiens
  misc_feature (1)...(250): n = A,T,C or G
gtcttgaggacccggaggcaatgnggtagctggaaagaagtccaattaanaccaacagttttctataanaaagtgaaanangngncnnnctgcngcgcggcaagccgggagtgagaggcagctatgacgtatgggcagatnggcngcaggacnctggnccctatcttccgccagnngccannagcaccgcccactcacggggaaagagagccacctantgagaaactgtncagatctcttttttcgcggc

SEQ ID NO: 2803 - DNA, 195 bp, Homo sapiens
  misc_feature (1)...(195): n = A,T,C or G
tttttttttttttactgggggcccagttagaagnaggngggngnttagaacctgancagtntngncnagctnaagccagtatcnncgggttaannnttcttttcaagnaggcagcacaggagaagaacctgctggctctgcggaccaggactccanacttganacaatgtntttcttagctcttattcccttttt

SEQ ID NO: 2804 - DNA, 330 bp, Homo sapiens
  misc_feature (1)...(330): n = A,T,C or G
actgaggttagtattgctgaggatgagaagatctgcagcaccaagtcaggtgcagggaaagtcctttaaaaaaacaagattcatacctccaggaagaagtaatgcagatgtgagtaaggagatcacaaagatgagtccagatccaaaactgtttcaggnagntcaacnaaggnggnnagnatnngntntncccctccctccctctntccctttctntgctannactaggtataggggcctnatgccttgctacctttccgactttcttcctcactcccccagncgtggttaccacgttnatcngccgccaatnntgccaggggcattgaa

SEQ ID NO: 2805 - DNA, 163 bp, Homo sapiens
  misc_feature (1)...(163): n = A,T,C or G
cgctgagttacacccccancntcagnnnatgtgtttgggttgggctgccagcccgagagctcccttgaagaaaaacaccaacgtgattacaatctgtgatgaatggcaaaaaagacgaaaaggaaactgaaaagaataaatacacttcaccttggaaaaaaga

SEQ ID NO: 2806 - DNA, 152 bp, Homo sapiens
  misc_feature (1)...(152): n = A,T,C or G
caaggtcaaggtagtgaaggactttcccccaccacggnggtgtcctggtccgtacctccgcccgggtgaggatgnaggcacctnggctctgctgatgacctgttcangccntcagggacnnntgtctccagccancctcacagacatgtcag

SEQ ID NO: 2807 - DNA, 134 bp, Homo sapiens
  misc_feature (1)...(134): n = A,T,C or G
ctgggctccccgtccccctgctnagtggncagtgaggaggagganatggactcacttntgaacnacagcgctggccccaccccatcctgaanntgnggaagacccagacgnggatttatttcgaagcagagact

SEQ ID NO: 2808 - DNA, 544 bp, Homo sapiens
  misc_feature (1)...(544): n = A,T,C or G
gactgagcagcacgaantcacatgaggaacctgtcttcctgccttccgaagngttnaccanatacgcanggantgcnnatntcctgttntcntatttgnggggcncccantaggntngactgacnntgcntgcangagcatgggctgagagactatttactggaagagtatgggtaatttaccagtggttataccactgaagagaacttctccccccctcccccccccagaaatcattacctgcccataggtcctcaggaggtttataaaaagattatcatttttacaagcagtaaaaaaggacactcagtgcgtgcgtagagtgaggaccccacacatttccctaggaaagcctggaanaatatgttagttgccatgaagacagtacaaggacttccctgggcagtcttgtaagctttgccggcaggaggaaatgcaatttttcccactgcctatcacacaatgcacccgaaggaattggaatttccccaggagttgcaggctgggtgaaggaacgggtctcagtgtctgtcaaaagaggatg

SEQ ID NO: 2809 - DNA, 474 bp, Homo sapiens
  misc_feature (1)...(474): n = A,T,C or G
gactgaggcctctgccgcacacatggagaactnaggcacttgncatccgatgctctactgtgggacttctcagagacaganggtcttanatnnctcctggntcacnnnacctcgntgtgacancncagcnccntcgttgatctgntgngagtgtgcacagagacnttatagaangaaanangttccttnatgccccctcttganncatggggtcangactctantgcctgcccannggcttntaatnnggtgaagangacctannngcaccagngctgccgccctcccctcnccngatnctgaccaanaagaagccnncgccatnatngctcctggngatgctggggctctggctgttttcagttcctctgcccccttcccctgcgcatatgttaaggggctatctccatggttccccttcacagtttgatggcctgtcacctgtatactgaaataaacctcactctcccctga

SEQ ID NO: 2810 - DNA, 343 bp, Homo sapiens
  misc_feature (1)...(343): n = A,T,C or G
gggctcagtcagaggctctgcccacgtgtgcacgaacccctccagcctcccccagncccaggagtggctgaaggacggagaacttacacgtggagattccggctcccaccaaacagatgaccttgcggcctggaacagangattgatggcacatgctaaggtttccctcctagacgtactgctggtgccgggcaggatggcattggcaacctnacgtttcaggatctcatggacgtcaggcaagcattaaattcactgtgcagccagccaaggatcaccttgaacttccaatcaccctgcttccatctttaagtgcccagcattgccatcatgcccagctaag

SEQ ID NO: 2811 - DNA, 276 bp, Homo sapiens
  misc_feature (1)...(276): n = A,T,C or G
aggttttggaaagcaacacganncaccatcacgttcatctgacacttctgacctaccaganatcacagcttccctccccgggacactgnagggacctggttgcttattgctgttgtcntacggntgatgacagagcagangatactctgctcatgcngnacnatactgaaactgggctggnagaggaggcnntgncccnggntananaangcaaaccttagtagagnngggntcactcaaccccttgtaaagtggggactgtctgtactgtggatg

SEQ ID NO: 2812 - DNA, 189 bp, Homo sapiens
  misc_feature (1)...(189): n = A,T,C or G
attcgtctccaagctaagngtctcacatcaggctggttagatggagattcaagtttgccatagcaccaagatcacttggaactgggtgtgcgccatcccacttggatctgttcatcaaaggggaagggaactgactaataaaggtcaaactcattagatttcaangnanaaactgggggggggggggtt

SEQ ID NO: 2813 - DNA, 264 bp, Homo sapiens
  misc_feature (1)...(264): n = A,T,C or G
gactgaggaagagagcaaacctcggtgctcaagggtgccacagactgccggagtcagggcagagtgctgcctagatctttcctctgcacactccatggatcaccgtgtctgtgcacccactgcgtgaagaggccctggagctgttgtttataatagagaatctctggatccaagatacctgagagggagcatgcagacagacagacagactccttccgtgactgatacaaggtcaaatataannctccaagggaaaaaaaaaaa

SEQ ID NO: 2814 - DNA, 232 bp, Homo sapiens
  misc_feature (1)...(232): n = A,T,C or G
tctttatccatttatcgccctggtagatatntactttanntccatacgngggggntgntataaaaattcgcccgataaacacgaagnggggggcatctctggttgctagggagatccctttcaatatacaccctggagngctatagntnngatcaactgggaaaatatatanttnattttaanntttagcatttaactatgnntctttactttncggatatattctgggaat

SEQ ID NO: 2815 - DNA, 136 bp, Homo sapiens
  misc_feature (1)...(136): n = A,T,C or G
gtttgatataatggtactgccntcgatcgatgaatnnaagctaggtacccggggntcgaagttggaactctcaaaggnccggacaggaagcatggatctactgcctcgaatcgatgaattcgagctcggtacccgg

SEQ ID NO: 2816 - DNA, 351 bp, Homo sapiens
  misc_feature (1)...(351): n = A,T,C or G
tttttttctacgcgtnctccaaacactgncctgantggagataaatctggatcaaaatcctggctaaagaagcaaaatcatagttangggcacgtnnaatggcncataccagatgatctggaancgaatggangnggtgcctccantgtagagaggcngatggntaactaaaaggagggatnccacaggngaggcttttcattggtnttattnataccgcaatgnaagggnacttttttttaatggggggnttttncgnactcantagtaangtaacccnctnacnnatgngncccattaataattcccaanaaaacccccttttgaacccncatttctaacaaaaaaaaa

SEQ ID NO: 2817 - DNA, 148 bp, Homo sapiens
  misc_feature (1)...(148): n = A,T,C or G
gactgaggagatctcaagcctcacaaacanaagngattcctntagtaacatgtnnaaacaacagcaacaacantaacaaaaacatgtcatcttgtctataggctgctctccatggtatgtcagagagacagatttaaaaacaaaacaa

SEQ ID NO: 2818 - DNA, 298 bp, Homo sapiens
  misc_feature (1)...(298): n = A,T,C or G
tgaaaggatgcccagtnngccaccccataagatcngatcatttntntnngnnanatttggctgcccactaganaagttnnnggttggncccttttccatnctgacttcnngaggcataggancttagctatagaanccctcaanctncgtnaggggcgaganggggcttggcaaggcttnttnccacccaccncaggggctcaggcacagctccaacctacngctttaattaaaaggccttttcaaaccattaacagcaataataataaaactctaaataggacccataaaaaaaaaa

SEQ ID NO: 2819 - DNA, 152 bp, Homo sapiens
  misc_feature (1)...(152): n = A,T,C or G
gcttacaacctgagcagctttgaaaagctaaagccanttcatgggntaagngntcttttcaagagacacccaccganaanaacctgctggctctgtggtccannactccagacttnaaacaatatttttttgccaagcaggtatggcctata

SEQ ID NO: 2820 - DNA, 188 bp, Homo sapiens
  misc_feature (1)...(188): n = A,T,C or G
tcgtgacttgttgacttanagaccttcctctttgccctccatcagtcntacncgtttccatagcngtatnggncaggtatnanannatgcttttccttacngctggacactcaactcanatcctcangtgctctgctgttgcaactccactccacccacgcntaggggaagnccttaatcccttttat

SEQ ID NO: 2821 - DNA, 384 bp, Homo sapiens
  misc_feature (1)...(384): n = A,T,C or G
ctcatgggaggccccaacgacccanccagtgaagcaggagaacctggcggttgaggccctgacgctcgactccccgtggcaccgcttccgccacttccacctgggcgatgcagcagggccacgtgaggccctggggctgctccgtgccctgtgccgggactggctccagccggaagtgcacacgaaggagcagatgctggagctgctggggnnggagcagttcctgagcgccctccctgcagacacccaggcgtgggtgtgcagcccgcccggccccanancnggaaaggaggctgttggcgcttgctnggaggagctctggntgagcanggaggccatggnggcccntggtgtggaaggggcttcccttggactatggtttct

SEQ ID NO: 2822 - DNA, 179 bp, Homo sapiens
  misc_feature (1)...(179): n = A,T,C or G
cagcgaggcgcgtgactcatggaagattgagnttctacctaatgatctnatcctccttaccctgaccactcaatgaccccatantttccngcccttnatnatccatnatnaactnaagacccttnccncagaantcnttggcaganatcnnanttgagacttaatgcaggtagctccag

SEQ ID NO: 2823 - DNA, 108 bp, Homo sapiens
  misc_feature (1)...(108): n = A,T,C or G
ggcatgttacctatacntantaagatgattcttgagatgactgcnggncttcctncctctgntgnaactttncttggagaancttttgcctncaaacctgatctgagg

SEQ ID NO: 2824 - DNA, 270 bp, Homo sapiens
  misc_feature (1)...(270): n = A,T,C or G
agacagacgtacatgccggtcgacnctcngatcntaaaacaagtttgagaggaannattaanatanaattattgantaaancgntgctntatggcnttatcacatgaccttaaananatactgcanagncgaccccnggaaganccaagggcagcagtgcaaacntttgtttgngggnncccgtattcatgctgtgcacatgtgtgtgtgctcacacacacaattcataaatataatttnnaataaatgagttacttaaagtaaaaaaaa

SEQ ID NO: 2825 - DNA, 402 bp, Homo sapiens
  misc_feature (1)...(402): n = A,T,C or G
gactgagatatttctagagccgcaaggtgactcaaaggatgagagcaggtgccatgaaagcttgagagccttcgcttctacaaaccatgcgaagaaagcaccggatgtggtggcacaaatctgtcagacctctactacgaagaaggagttacattctaaaggcngctgctgggtgaaaatgttactagaaagaagaagaaatacaccacagattcttcattagctctctanntgnatatcngnggnggactcgtnacgtatcttgggcgtatcatttaacttggagaagcnnnaggcatcataganaggccacctagatccagtccagtcccttttgtcatgaaaggaccactgagnccagcacccaaagcacacgcagnaggtgatttttcattttttttt

SEQ ID NO: 2826 - DNA, 141 bp, Homo sapiens
  misc_feature (1)...(141): n = A,T,C or G
aagtagtagcctgggcaaaggccataantacttcttgcngaactcncaaaggtcnnacaggangcatggctggttccntagtcctggcanaagtaganggagctgtctgaggctgaatnaacccaaataaccagttctatg

SEQ ID NO: 2827 - DNA, 102 bp, Homo sapiens
  misc_feature (1)...(102): n = A,T,C or G
tgattttgggcagatgcagtcanatttangagttcaaggatcannctgntctacggattgtgatccatgacagccagagctatncagagacaccctgtcttg

SEQ ID NO: 2828 - DNA, 333 bp, Homo sapiens
  misc_feature (1)...(333): n = A,T,C or G
gactgagtgttattgaacattgactgtgcagacttcagagtttaccaagtttgaggggctggccaaatccttctggacttactgagaaaggaacagacccaggacaccgactggagctacacggtgggcgccatggcgccaggccgagacacgtggatccttcggctttgcttctgtgtctcagctacctcagaggtttgctgtggaatcactagtattttaaacaatgcanacgcaattacagttgaagcacattctctaggagaaggaaaaggagattggcatgtagaagcttcattaaacttttggccttttcaaagctaaaaaaaaaaa

SEQ ID NO: 2829 - DNA, 385 bp, Homo sapiens
  misc_feature (1)...(385): n = A,T,C or G
ggactgaaggtggccggaggctacagattcagaccgttgccaagggaagaacaggcgcccncaanacacgatcactagtgctgcggtgaactcctggactgggcagtcttcactgttctcatgaaaccagtccatgtcaagaatggaaaaggcaacaccaagttgngagaaagaccacttcctcaacaagaaatccagctgtgctatcttcacctcgttgcagaccagaaacggtggttcgggttgtgtattggttcaagcccgagccagctttgattccctgtagagcagaactggacagaggtcacacctgaactggacgtggcactggctacatttttattaaaaccaaacaaccacnattacaaagcaaagcttttccaca

SEQ ID NO: 2830 - DNA, 397 bp, Homo sapiens
  misc_feature (1)...(397): n = A,T,C or G
agactgaggcccctgtgncccagaaagaanctctgaaaagtnnnctcctgnnaatatgtcaagtctctcaaggacagctntttcggtagaagacagaaganggtctaacctgagaaagcacaaggcagtctctatgctgaagaagttaaatgccagctatttggtcacngggaagagaaatctcctccgtggctgtgtggactcccgaaaactgaacagaggagcctttctttggctctcgtgaagacttctgtatgtgtgtgcaaaacagtcaagtcaggagcgtctagaaaaatcatggccttcagngcctggcagacctatgttcaaaacttaacttgttttatttcactaacggtgtgaatntggaataaattattctctgagcctcaaaaaa

SEQ ID NO: 2831 - DNA, 293 bp, Homo sapiens
  misc_feature (1)...(293): n = A,T,C or G
ggcttacggggggggggnccccattccccttttgaccaggnccagggaccacantncacttttggggttanaaattgggnggggcttaanaannccngttaacngngagcctttttgaaaancncgggggcttgggnttaacttncttttaanatacaactttnaaaacnaanttcccccggggtttcaagttttntggcgaatggaaagggccggtttaaaaccccccaaaggacncccngggcaaccttcctggnaatngggggaaccccgggggtttgccccaaagggaa

SEQ ID NO: 2832 - DNA, 117 bp, Homo sapiens
  misc_feature (1)...(117): n = A,T,C or G
gttagcacggagtctcgagaggtantatnactgatgtccntgaccngngacaggttgcaancatgaagacangattccttgtntagnaagggaaacacttatactttgggatgagga

SEQ ID NO: 2833 - DNA, 101 bp, Homo sapiens
  misc_feature (1)...(101): n = A,T,C or G
aacagcaaaacatctcaggcngncaaaaaaaatgaattgtgancttaaccatttcntntatgccacgnanggcgtaaattcctaatgatactgctcaccca

SEQ ID NO: 2834 - DNA, 304 bp, Homo sapiens
  misc_feature (1)...(304): n = A,T,C or G
cggccagtatattttgttggaaactgaaaagcaacaaaatgcccagcaccccgacaaggatctgaagggcttanatccttcacatcctcttaaaaatcgcttgctgccaagatgtcagtacacacttcgcatagcagacacaacatcggaagcctggaggtttcttcttcacagaagatttcagcatccagtggcctcgtccacagcagccggctggaactgcacttgaaggcagatatgtcagagtgtgagaatcatgatccattcgtgaatgctggaagtaaaaccatcgacataaatagca

SEQ ID NO: 2835 - DNA, 138 bp, Homo sapiens
  misc_feature (1)...(138): n = A,T,C or G
gactgaggagctagtgngatgctgtacaccggccggtctgnctgggagancgngatgcagtatgtggccnanatntncaagtgctgtgtgacntaagnaganccactggctgctgcttgacctctagttgctacctgg

SEQ ID NO: 2836 - DNA, 163 bp, Homo sapiens
  misc_feature (1)...(163): n = A,T,C or G
gggaatggggcacccctnccccttncttaanaacnggtgtgacaacantnnagagttgagcctngatcaggactnaaaattattttttnaggggggggggngggacaatacgtcncntaccctncangngtgaataacccatagataccctacctaagagaaa

SEQ ID NO: 2837 - DNA, 119 bp, Homo sapiens
  misc_feature (1)...(119): n = A,T,C or G
aacggcaattaacgtnaattaacatctgacgctgccccctccctccctngcngtntcgttcaaccacaaaaggnttnnnatattgttnttttgaattctnaaagagacctcatcttgat

SEQ ID NO: 2838 - DNA, 113 bp, Homo sapiens
  misc_feature (1)...(113): n = A,T,C or G
ttttttcctctgtgtgtcctggaantcactgncggggaccagnctggccttgaactcacagagatntnctgcctcagccttatgngngctgggatnaaagaagagtaccacct

SEQ ID NO: 2839 - DNA, 284 bp, Homo sapiens
  misc_feature (1)...(284): n = A,T,C or G
ctctggttgctctggccaaannaatngaagtcacttttgctcctgtntccattcgncgagtagcagctgnaagcgcggatcatgacatgatcnaanatngcaagagtnggatccctnactanttacangctaaagantaacacagacgcccttgttcaaggttatgacccnagagcttncaccagcngatggaatattcgattaatgatgatcaacattaanaagctaaagttcctaacacacacaattatgtctgctacaaaggccaaaacactttgcaccca

SEQ ID NO: 2840 - DNA, 153 bp, Homo sapiens
  misc_feature (1)...(153): n = A,T,C or G
ctggcagctctgctaacactgatgngaccatacatccactgaggcagctcatgctaataatgagggaccatacatctgctgacactgcttaannangtatncatcttanccntnatntangacntaaatttgatggngaggaccatctcactg

SEQ ID NO: 2841 - DNA, 112 bp, Homo sapiens
  misc_feature (1)...(112): n = A,T,C or G
tttttttttttctaggnttcctgcctggtgcatntgccagggggccggcttctgatggtnanttnctcttnanatggcagagacggtagaagggcctgcccgggaagtgaca

SEQ ID NO: 2842 - DNA, 475 bp, Homo sapiens
  misc_feature (1)...(475): n = A,T,C or G
gactgagatttctcagcccccacngtttagtacanccctcantnannngactcttcaggagnncntannaacntactttatgananaatgngacctagagtatgttctcgttgaanaacagcagcttacctaaattcaaatcttcacatgagacagttctgaactatgacacagtttccgtggaacacaaggacctggcactcttcagactgcattgggaagatggtcgggngagcacagtgcttggngacagagcagatcagcncaaggtgacgganagagaagacagagtgagtgctgagagcaggaccccagagaaggagcacatggacatgcggcatgacggttgcttggcttatgncctccatacctnagggaccacggggacaccgaagattgncagagngccccatgcatgcatactgcctaatatccagcacttccggagggcctgnccttggaatccttcctggag

SEQ ID NO: 2843 - DNA, 117 bp, Homo sapiens
  misc_feature (1)...(117): n = A,T,C or G
ttttttttttttttttttaaaggtgattantacatgagactacggnatgnnatcctgcagacgccanctgccgtgcagggcnnccgtatcccaggctctttcttgcagaagcaactg

SEQ ID NO: 2844 - DNA, 104 bp, Homo sapiens
tgattacacttttagacaatgtgttaatcaatgaagtaagcctgacccacatagtgagtgcctgtgcaatcagaacacagtgaaaccgtgcctaaaaaaaaaaa

SEQ ID NO: 2845 - DNA, 317 bp, Homo sapiens
gactgaggaggctgagactcgtcctctactggagaaaaacctaagctgcgtgcacagcatgcctggagtcttcaagcacagcaaattcaaggccaggctggtgcacatgaggccatgttttaaagggcgggaaagacagtgcctgtgcctttatccccagtttgatctgcagctggaatcaacatggtggaaagaaagaaccaactgccacaagttgttctctgattccctcttgtgtgccctttaggctctcgataagcaagcatgtcacacacacacacacacacatcacactaataaataagtgccaaaattaa

SEQ ID NO: 2846 - DNA, 179 bp, Homo sapiens
  misc_feature (1)...(179): n = A,T,C or G
gactgagattgcccaggcaggatgacccataatntggttccaggaaacaaactgatgtcctgcnatttgctgagcacacccctgccgcancaccagnctgtataggaccagtcaaagggcatgagatggctgaaaggataccagggtggcaataaaattactctcaagcgtcaaaaaat

SEQ ID NO: 2847 - DNA, 397 bp, Homo sapiens
  misc_feature (1)...(397): n = A,T,C or G
gatagacccatcctcaacangccctgnagagtangagctcagncaggctcttcatctnctcgcncatcctgnngtccacagntaccntgacctntgacctttntgcattcaaagccagncaggtggagcttatgctggggagattcaggaaggacacacaacccagcaaaancagatcccacacctaatcaggntantgcaaaaagccatgngcccntcgnnctaacttaatctnancccaaccncccagancagggatnagatcagttggatctcttcanctatcaactgtgcgtctttcctatcaactgngtttntntactctctttcaangnncggccaaaatgnacntcctccaggaagccttcccttataccctatagaaaacagcccgcgg

SEQ ID NO: 2848 - DNA, 368 bp, Homo sapiens
  misc_feature (1)...(368): n = A,T,C or G
acctctctgaatagcaccacaagcntttttanncanntagntacncaacgaccacccgngccntcagtgncaaatccacctctagagagagttagtctgcacaagagttaatagccctganccgaaacctgnaagactcttcatnaggtggctggctgagcgtgctgtagactctgtttgttggagtcccgctcaccaatgaaaaggaatactctgataccctgatctactcagcagcttggatggatctccagggagtccgaatgagagaacaganccagtccccagacacctgcttccgatgcagcacccttgaaaactgccacttcctagaggcagagccatgaantgagggtttctggaagcaa

SEQ ID NO: 2849 - DNA, 428 bp, Homo sapiens
  misc_feature (1)...(428): n = A,T,C or G
tggacgcgttgacgttctacagtagagatgaacgaccatttatttaaacagttacctaggaagangcacacctgcagatgcctcctggatttctgcttggcacactggcccgngccacccttgaccccagatgcccttccggcatgagttctgacttcctctctggcatctactctgaggatacttggcctgtttncctcctnttttatttgtcngngggncctggctgccgnttcagctccctctaatccttttggtccttcagagactccagacagatccntnccttnttttaactatatctcctttnatgatngcaagttttcancaaaggagttcaccaagcccaggggccgccattcatcttagaatcgaccagncccaggctcagngccaattgagagctactcntggagttaggcacccca

SEQ ID NO: 2850 - DNA, 339 bp, Homo sapiens
  misc_feature (1)...(339): n = A,T,C or G
atgtccaagatacactgaccgatgagcctgnnagagctnctgagaggactgacaagagagctgagtcttcggtgancagcgagnacatcngtgatctaacgtcaaggnaacatagtacaggcggaggagnccaganagccagcagcattgtgcctctaccctgcagggtgnggcaaagatcggtgtggaaagntgagcnangccggcacacagaccaacacacactcgtcgagatgcgacagnttnactcntgggaggtatcgtttngacntagatttgnagagaagataatgcgnctgaaccctatcanctgggacaaataacttggaaaaaaaaaaa

SEQ ID NO: 2851 - DNA, 326 bp, Homo sapiens
  misc_feature (1)...(326): n = A,T,C or G
aggcctgtacctaccctgcatgtgctaccagcccttacctctgcagctttcatacagcaccgctcactgtgtgtgagttacgggacttgcagacggtctctataatgggacattctaccatcatctaccataccatacctccgtncccaggtcttcctctgcagcctgacccagagcaccaagcacgggagggcaggagcagtttgaacctgtttttggtttnacatagacctncataacaagaaacatgacggatccactgantgtgttnaaacttgcatttgtatttagcacatgcaatatcaccccaagcaatttaaatacag

SEQ ID NO: 2852 - DNA, 459 bp, Homo sapiens
  misc_feature (1)...(459): n = A,T,C or G
gactgaggtatctaaagacagtgcctttcgtaaaccaggctggcctcaaactcactatggagaggacgatgattttaaaggtctgttcctcctgactccacaagagctgagattgcacgggtgaaccgccacgccagtttgcaggatgttttggatggaacgcaggacgctgtgcatgctaggggtttcgcgcatgcgtggagcatctttcatgataggattaactgagcaacatcgccagctccttccttcgtcagaatgcttctgaaacatagttcagctgtggcatggcttcgttttccacacacttctccagaatagggttcctcaggagagtatactgcctagtgtgtgtgtctgtgcactgcatgtagtgtttgcacacaggaagactcatnggcacaggcacttgnggagaccagagcttgacttngggatgactttctccacccttatgtt

SEQ ID NO: 2853 - DNA, 121 bp, Homo sapiens
  misc_feature (1)...(121): n = A,T,C or G
gacacactagaacgagggcaccagatctcattgtgggtggnngncngaaagcccagngtgntagntganacnctctacacaangcaggaaggnactntaactcaaagagagaaacctgcga

SEQ ID NO: 2854 - DNA, 145 bp, Homo sapiens
  misc_feature (1)...(145): n = A,T,C or G
tgagacttaccacacagctgcctctaccctggncagncaaggtaacatngaagaggaagcccagncagtgataatgtganaatatggaaggcgatggcnagcanctngtttttttntnnanagggggagccttactgtgggaaac

SEQ ID NO: 2855 - DNA, 151 bp, Homo sapiens
  misc_feature (1)...(151): n = A,T,C or G
tgaggggctccaggttagaacaagtatggagctnagaacctgngtagnttngannagctaaagncagttcatgggtgaantgntgntcttcaagnggcagacaggagaaggacccgctggctctgnggnccaggactccagacttgaaaca

SEQ ID NO: 2856 - DNA, 135 bp, Homo sapiens
  misc_feature (1)...(135): n = A,T,C or G
attttttttttttttntgaaggctatgtggggaccctgggggagcagcngacnggacagcgtcagtgcagatncgctantacnaaaggcntncggngacccatactgngcgtattntggatgagtgtagctgtgg

SEQ ID NO: 2857 - DNA, 107 bp, Homo sapiens
  misc_feature (1)...(107): n = A,T,C or G
gactgaggccgacgtgaagacgaaagnggaagagctcccattttacagtcaagataaagacgagtaataaaaaagagctgtgaagatacagaagatgaaaaaaaaaa

SEQ ID NO: 2858 - DNA, 368 bp, Homo sapiens
  misc_feature (1)...(368): n = A,T,C or G
tcttggaggaccaacanggaggatagcaggacctacatattgagatgaacgcctgngataagatgggaggacatcccacaggagaaccagtctgtcatgcagaggagtgnngctgtcttggcgaccnacttgcaagggaagcncaggagatntgagggtcaagctgaccgatttcananctgnggcnagagctatcaggcccnnaaagcnatggatacaagntgctgtncatttnnactcnccagttncactggnccaggatccaccagggatngaactgggcccanggtgnacacacnatggggaccggnctcanggcnnccgagagaancttncagaggctaccnccggggtgcccatctttgttg

SEQ ID NO: 2859 - DNA, 254 bp, Homo sapiens
gactgaggtccccaagccgacagtgtatgtgacaagattcccaggaaaagggaagagactcggctcttgggtgcatgcagactgcctccctacaccaacctaaacatagtggttgagccatatagctaacaggtggatgctgtttggacatcagcaggtatcagttaaagcgctgatcaccaaggcatgtggtctgtgagccccctctatttcttttccctggaatataaatttctcataaagcgaagacaaac

SEQ ID NO: 2860 - DNA, 128 bp, Homo sapiens
  misc_feature (1)...(128): n = A,T,C or G
tctgcttcctttaaatgagagcttcntcttatacagantgaggataaagacaaggatggagcatanaccggggtcccttncttggggaaagagnataaccaggtggcncttntcgagcctttggaagc

SEQ ID NO: 2861 - DNA, 113 bp, Homo sapiens
  misc_feature (1)...(113): n = A,T,C or G
tttttttttttttttnttgttttttnaccaagctgggccgggggcaaccatncgagctacacccncgaccctcccttncgttcggntgcgncantaaaccagttgtgtctagg

SEQ ID NO: 2862 - DNA, 338 bp, Homo sapiens
  misc_feature (1)...(338): n = A,T,C or G
gactgaggtctactgngtagcccangtcgctctcaaactgangatcctcctgtttgggctnncacattgctaagtattacgggtgnngctaacgatcacacagctgctggagatggnccatataccgncnnagaaggntcacnntctgaatgatcactggcngcccctgtgtntgaggaactggaaaccgagatacnctgcanngcaggtgctcttancaggaacttgttnagttcatgnntaactatacnacgctgnccgggganaanggctgcncaagaaacacccctgtngaangaatccaaggatctaggntgggctgtgtttggattacaaaa

SEQ ID NO: 2863 - DNA, 117 bp, Homo sapiens
  misc_feature (1)...(117): n = A,T,C or G
tttacaatactgctaagncagcatcanctattgaatntgganttacaaaacnagagaatgttnccaaacccncnccatatgnctataaacccagacatcnatcttgcaaggacttag

SEQ ID NO: 2864 - DNA, 233 bp, Homo sapiens
  misc_feature (1)...(233): n = A,T,C or G
gttgaggagctgacaccntanggacagatctttgnagcctggcgntnaccagcnannagctacntactgnccatgcnctactgcnctgaagactacattggagaggctggagagangnctcatcnannctangagcagtggacccaggttcaattcccaggcccgnatgacaactcacaacntncctaactccaggtgtagaggttctgacgccctgagacagacatgcatgc

SEQ ID NO: 2865 - DNA, 229 bp, Homo sapiens
  misc_feature (1)...(229): n = A,T,C or G
gctgaacctgaacggnacttngnctgttaaactgacggacgngacnacgccgggcnggtannntgggaaaaactcggttggctacgtgtgtttngaaattgggtacggttgggngacngagnaaacntgtggtggtatacgcgcggtacgtaatcgaaaaatgtgtcgcngacacgtacgacgngcgtatttggnggacctccggaacgatcggggtggtgtgaaaccg

SEQ ID NO: 2866 - DNA, 115 bp, Homo sapiens
  misc_feature (1)...(115): n = A,T,C or G
gctgaggaaactttcncagcgcttgtacngagcaagcctttccctntggacctgcnacactnacnttngatatcnntcaactttgacagtccnactttactaaataaaaagacac

SEQ ID NO: 2867 - DNA, 221 bp, Homo sapiens
  misc_feature (1)...(221): n = A,T,C or G
ctcaagacccatgtagaccnggtactaagcccnnaccccttccttcatggntgggggcngacactgntgncannaccnngttnanaaaaacctctcntnttcanncannancagaacttctttctgtgaaacctcctgagccaggcttccagaattcaaatgaccctcagcaacaaagtctcccatatccctacgagggtggcccattaaaccccacagaa

SEQ ID NO: 2868 - DNA, 201 bp, Homo sapiens
  misc_feature (1)...(201): n = A,T,C or G
actcacatctggaacatccctcacagcctgnaacantgtttanaggggcaagaagcacttcatatatgtacctaaagaagatctactttctttttttattttgcatncttctccacactanananctnactttgnaaacctatcnnttngagantgnncgtagactcttggngnggagagaagccttctttcctagcgtct

SEQ ID NO: 2869 - DNA, 264 bp, Homo sapiens
  misc_feature (1)...(264): n = A,T,C or G
gactgaggggacgccagcctggcacagctgagcggtggaagaggagatctgtgtctgccatggacagagggctgcttgtcctgcaagcctgggatgnttgccactggcccctaaagaagggttcgttggactgngttatagctgaaagtcaaaggctccatgactcttgcccccttctcatcagaatcaagggctagaggctgctccctatcgcatccttgccctatgggccactacaacnggaatctgagtgaaaaaaaaaaa

SEQ ID NO: 2870 - DNA, 187 bp, Homo sapiens
  misc_feature (1)...(187): n = A,T,C or G
tctgggcgctggtccaagagtgnatncgagccaagtcactgcccatnctgtgncatagcaatgaggcgatcggccaagcaacaaatcaggtgctgacacnccnngcttgaggtgtatataaagcagcaccatttttccaggggttcgggggtcttcctcctgatgaagcaataaaaggtttgctatt

SEQ ID NO: 2871 - DNA, 281 bp, Homo sapiens
gactgaggctccgctctcccgctgatcagggctcatgtcagagaccagatttcgagtggggagatggatctgatcgacatcctcagaccagaattaacctgctaaaccactggatcacttccggcctgctctggtgtaagcaaaatgcggcccctcttggcttgttgagaagttatcccaatagctgaagtatttgggggtgcaaataggaaaggggacaaaaaggtttcattcacatttatcatgttctttaacataaaagtactatgaaaaagaaaaaa

SEQ ID NO: 2872 - DNA, 111 bp, Homo sapiens
gactgagccagacactctcaccgactcaacgtcatcctctgtgaccatcactgttactgatactcagatagcaaaaacggactgctaatttcacaaacaataacaaaaaaa

SEQ ID NO: 2873 - DNA, 522 bp, Homo sapiens
  misc_feature (1)...(522): n = A,T,C or G
ttttttttttttttatggctntnacatgaaggcgctngggggtngaaaaccgnaggaccacaccttccacccnnctgtcatgagaaccggagaagaaacatgctaaatgcttagcactgggcagaggaggtcttctgtgactcgtcccacatcagggcagatttcttgaaaggtcccggtggcagagacctgtgaaaganggcccggggccactcacctgactgtgaattttttntggctganntgctgcgggatatntttcctttggggattncaggcangcnaaacttttgagganncgattagactgaccccnaggaagaggaggangancnaagaggagngaggnncttttcgaccnaagctncggcagcccgtgctggaaggcatgtggnaagggttaggagncatcactgtgctnaaaaccaagaagtctgngccagncanaactctgatcttctactcataagacctggagtccttnatnnnnacaggancgggctctcggctttttttataagg

SEQ ID NO: 2874 - DNA, 105 bp, Homo sapiens
  misc_feature (1)...(105): n = A,T,C or G
ttttttttttttttttgggctgaggtagtagcgctggnngggggccatnattacttnttggggntctnttttggtcggacaggaagcnnggcctggttccatata

SEQ ID NO: 2875 - DNA, 424 bp, Homo sapiens
  misc_feature (1)...(424): n = A,T,C or G
ctttacagaaacttgagataaacatgnnctgatgatgagcaatatttggcaacacactcanancngcagcatatgaacctggtcttacaanacttgcagantgcatttnagtggagacagttgnggatgaanatatcaatccttctnccntatcgngaagatgnngagagcnnngaggntgcctcngnngtggaggctgacanccannnnaacntacagacaggacttggnngacgaacctctgncagncgagggnggcgtttgttcctaaagggagggatagagccaaaagctccaggaaatctgacccaaggaaaagtccagttttcagngatgaagattctgnccttgactttgatattggcaaattggagcagcagaccangatgcnnatcangccnccctggaaaaccaaggagaaaag

SEQ ID NO: 2876 - DNA, 278 bp, Homo sapiens
  misc_feature (1)...(278): n = A,T,C or G
taatggctgggggggggtgcctccagtggctcctatggtgggggccaccctgggcacagccgaataccagctcctggtggctctgcaccatcctgaggatttagaaccatttccaaaggngatggcatctcaactcaaggcttnagacttggntactctagctcagctggagngaagctgngacaaggaccaatcttatcccactctgnaagagcaccatgagctggncagcacgcaaganagatattntttgattactatgccagactaggacactt

SEQ ID NO: 2877 - DNA, 186 bp, Homo sapiens
  misc_feature (1)...(186): n = A,T,C or G
tgagccacaagagagcccgagtggagntgaanagagcagccatttttcaatgccagggaactacnagcgcgaggttagancgcaaccagnganctcctggcncgcatttngacagctccaggagtgtgaaggccncaagcagaacnacaagaatcgcggggancagctggagcgccaccagggctg

SEQ ID NO: 2878 - DNA, 242 bp, Homo sapiens
  misc_feature (1)...(242): n = A,T,C or G
gttggctaggctcaantctaacagccacgctaccgctgaccctancnngtcaacacaaacggtatctcttactcggggcatctaatttaattattctttaaaaaatattttttaatgtgaacattctaggggacattaaaatgacatcgaaatgaggagcctcttctgcgattcanaggtaaaaggaaatttgttagngactgntccattcaaagaanatganggcgcttgatggaagcgat

SEQ ID NO: 2879 - DNA, 313 bp, Homo sapiens
  misc_feature (1)...(313): n = A,T,C or G
gactgagagacctgcctgcttcgactgtgagaggaagcaattgccatactctgtgtgtgagtggggtctgncctcacctaggatgcagccacactgcaggcccttcagcttgctacccatgtggcagcagtcctcacagtccagactgggacccggcttctgtcttgagggcacagttggngtcttctntccagaaggctggcctctcttgaatctgctggcacaggtcancactgctatctggccggaagctcgtgtnacatgtggggtgctgggaanaactgttcttnaggtggnggctgaaaagggcacg

SEQ ID NO: 2880 - DNA, 118 bp, Homo sapiens
  misc_feature (1)...(118): n = A,T,C or G
tcaggacccttgagttctnaacagatctagatcanaggccgngtatnctgcgnagnanatgtgataacggccattttaccccaaattccgactctatanataaaactttaaggactga

SEQ ID NO: 2881 - DNA, 174 bp, Homo sapiens
  misc_feature (1)...(174): n = A,T,C or G
atcttgaaatgaagaagggcctttcangagggttatanagctgaaaggatggaccngacacacagtcacagcaacagcatggaagctggctactcaaagcannaatctgcaaagaagtcanggtttgcacgcagtgcttcagcccgcttttgnacacncttttttgaaaggggg

SEQ ID NO: 2882 - DNA, 211 bp, Homo sapiens
  misc_feature (1)...(211): n = A,T,C or G
gataccagctctaccagacaccatagccatggttagcctggnttcactctccancgtgcatggcagtactgggttgggcgtactgtgagaagctttatgtagggccaagctgcaaagagctagcatacngaaagaaaaaactgacttggaaggctganaggtacatggacaanagcgcagagngagctgaggcngggggaccccgaggggg

SEQ ID NO: 2883 - DNA, 261 bp, Homo sapiens
  misc_feature (1)...(261): n = A,T,C or G
ctcactcaccacacagaccntaacnacacagacnccagtgattanaantttggaacaaacacactgcttntgggangaacaggcttcttncctgnggggatcaggcacccccaaagcntnancctgngttaaccgcagtntgncacaccagccacggacaacactggtcagctttggggcttggcaagcagcacccctancaatgccatctcaagtggcagcacctcccaaccnagggggacangcccccactggtctttg

SEQ ID NO: 2884 - DNA, 115 bp, Homo sapiens
  misc_feature (1)...(115): n = A,T,C or G
aaccagacccccccaaagtnngtaagggggaacnacgacccncccaacggccaaggggaccaggacncntngccnagggcagagaaanncccaccggacgggaacgagagagaga

SEQ ID NO: 2885 - DNA, 587 bp, Homo sapiens
  misc_feature (1)...(587): n = A,T,C or G
ggacagatacagatgctgagctgggaccttgtcagcccgcctctccagagaacacgggggctttttgatgctgtcaagtgcacccactggggcagaaggggggccaggggggcctttggcccttggcttaaggctgtccagaagagcggtcacaggccccccagcaagctttccagcttcttctattgacctcaaaggcttttcaatttggagggataaaattcaaggattattggcacaagaggaatcttacgggggcccgatgaacattcggaatttgcttcccgggaaggcaccagaaacaaaagccagaaaattttaccccaaaggcaggggcttttggggaattctaccccattctggcatgggnccaaaacacactttgntcctttgtcttcaaaaacccaaaagcaaaaaaggggggngccctactgggttttcggttctggcccattccngggaacatnccgngcccagnngttggggggcaaggttttccttggnatcccttttannanggaaccgannaagccccaatggncttggaattcccttaacgcgggccctggttttttatgaaaatttgg

SEQ ID NO: 2886 - DNA, 394 bp, Homo sapiens
  misc_feature (1)...(394): n = A,T,C or G
gacttctggggagctcctgcttaagtcagactgagtctgaaaataaccaacgttggtgtcctcaagactnnaanggcacggaaggacanaaaaagcttgaacgactgctgtgtgctgaaaagagcggtggtacaccaggttcccaggancggttcaatgggagtcgtttcctagcaaaacacacagccaagggggaaagagtgcagcttttatcattcctctgtggacacagaaaagcattgacgaggcttctnctttgtgtcgacagtgtggataggatcaacccatgggccaggctttctttctaaagcctattatttgnatattttaaataagtatgtattgggtttaaaacattctgaaatataggatattgtatatttaaaaaaaaaaa

SEQ ID NO: 2887 - DNA, 141 bp, Homo sapiens
  misc_feature (1)...(141): n = A,T,C or G
gccgttgggacccccccccaanggttagggnacacggaagcccaggcagcccggnngggancagcnaaggtangctgaaaaagnccatcnaggcagacaaggctanggacnaacaccacaagganaatccggctatgggca

SEQ ID NO: 2888 - DNA, 102 bp, Homo sapiens
  misc_feature (1)...(102): n = A,T,C or G
ggggaaaccacagaanncggccagagcacagcccanggaagccctnggncccaccggngaacacccaggccngcccccagggncgaaccagacacccaggag

SEQ ID NO: 2889 - DNA, 238 bp, Homo sapiens
  misc_feature (1)...(238): n = A,T,C or G
cttataaatttaacttcttcacttttnaaacancntantnacattaccaaaccacctacttaaatncataaaacattnttccaccccaattcatatnacccccnattccnaaaccattnaactaaatactnaacttanaactataattcccctcacctaaattccntacttaccacnntttaaaaacccacctataaanctttttctaaccctaaccaacnntttttttttttttttt

SEQ ID NO: 2890 - DNA, 273 bp, Homo sapiens
  misc_feature (1)...(273): n = A,T,C or G
caaagaagcttgtgctcgncagangaaagagaccatcacanatgagcacaactggtccacatgcagggaatatctaggttgngggctgnccagccaccatggttgtagatgcaaatcatctcctgcagccagggctcaagaaacgctatgaaagaaagggngnaaagatcttaagagtcatgagaaataancagtctgttgtgaangcataccatgancagagatcagnggcggagntccccanngcttgcttngagccagccaatcagatgg

SEQ ID NO: 2891 - DNA, 143 bp, Homo sapiens
  misc_feature (1)...(143): n = A,T,C or G
caatcacactgtcctgagccctttgntaagctgnctgctttntccacccaacagccctaagaggctgagactcaaccacatggcagncacatgagtncgnagaatganntnacnttagaatctatagtataaattaccgcaga

SEQ ID NO: 2892 - DNA, 284 bp, Homo sapiens
  misc_feature (1)...(284): n = A,T,C or G
actgaggttgccgtatcctgagctgcaatgttctctgangcttctcactctggtttgccatgtggnggtgtcgtatacctgcccttagctcaactctagcatcaataaacagctaccacatgtcaatcactcatgccagacacattctgcattagctcatgtaaaccccacaagtctctgaagttggaatgacnggtcctgctcaagagaaagaatagatgctacttggagaaaggagatcattagatggaggtcagcaacaagctgatgggaaaaacaaaaaa

SEQ ID NO: 2893 - DNA, 122 bp, Homo sapiens
  misc_feature (1)...(122): n = A,T,C or G
actactagtaaccagcagcagcagcnccagtgatggntaaagagntgnctnaacgaataaaantncttngngtgtttcttccagaggttncgnggncatcctagttgggggataacaaccat

SEQ ID NO: 2894 - DNA, 200 bp, Homo sapiens
  misc_feature (1)...(200): n = A,T,C or G
ctcaacaagctgggattccgtgntgntggtgacttgnacagcattgngntctgtagacanctgtgacagagaccacggatgagtgnantnacncctgcngaggctgggnnactgattcagtgnnctgccttnctgncgccaggaccctttaccacagttcctcgggttgcggngtcctacaaccataagataatctttgc

SEQ ID NO: 2895 - DNA, 352 bp, Homo sapiens
  misc_feature (1)...(352): n = A,T,C or G
attatagtgttcccantaganggnatccacggtttcaactttacaagaacatccatttacccgnncttggattttatgccgnctcccaagctggncaggtggaacccgtgtctggagccctttcggttcaatgacacggaggtaggtgaggagnccagcagactgagccaaaagccacagtgtgctgcctgaggtttgaaggaggctctgggatccnaaccaccgagcctaaactccccaagccccgtgctgatacgggacattacgcanatacggatcttttcattggngaatttcacaagacccacactaatcgaaacatattaaacaagtcaagttgtaaaaaaaaaaa

SEQ ID NO: 2896 - DNA, 120 bp, Homo sapiens
  misc_feature (1)...(120): n = A,T,C or G
catgcacgttatcctgcctcgtttggnatgaagcgcncatnacacgtaccangcgagcactctgcacaacctagccccttgtcagaacctatccaagaaagttgtcttctgaagcgctga

SEQ ID NO: 2897 - DNA, 467 bp, Homo sapiens
  misc_feature (1)...(467): n = A,T,C or G
gactgagatctgtcgaagcagntgcaggaaaaaatagtcctgcaatctgttccagtgttngcccttctctgaacagtttgcctcgtgagaatgtccacagctgactcattctattctacaaataccaaacggcacccagggctgtgattnnanccacacctaccctgcccagntcagaaacagncactctaggcctcagaatcatctattttcaggtgctggacggccttattaaacggnntgtattccntgnaggggaatggccccaggggccgggaatgancacagtnccgaggctttgaacggttctaatcgtgagtgcntttaaaccagaggaaggaaaagcgaanctgaagggaacacagaacggcaggtctttacagtnnaacccttgangctcggaaatanatngcatggaaccaaaaacatttggaagactgctcattgaagcaacagcagcaagatgt

SEQ ID NO: 2898 - DNA, 116 bp, Homo sapiens
  misc_feature (1)...(116): n = A,T,C or G
tgactagaagccttcatttggtaacccactgaggnntnaacagnccctgattctctgcctgtctgccancccagggcagccaagcctntttggggaaaagaatatcatttgttttt

SEQ ID NO: 2899 - DNA, 142 bp, Homo sapiens
  misc_feature (1)...(142): n = A,T,C or G
acctggacacagaaatanggnttgtngtancctcctctcagnnctagatgaaaaagnctgnggnaaatgggtaacctgcacaacactggcaatacttaaataatagaatcaactgggagataaaaaccatccaaccaccatg

SEQ ID NO: 2900 - DNA, 146 bp, Homo sapiens
  misc_feature (1)...(146): n = A,T,C or G
accaggctccagcgtcagcagaaatacganttgnaaagacccaggctggtggaagggaaggcaccctccaatccccanngcangcccntnttggcaaggncgancngngnctgtgcaggtctaatcntnactggctgagctgcctc

SEQ ID NO: 2901 - DNA, 272 bp, Homo sapiens
  misc_feature (1)...(272): n = A,T,C or G
ttaccaaggccacgtagaagagcagaaggntgcctccagtctctgaaatgagagacggagtatggcagagttctggaaaatgtccactagaaggtaacatcagctaactgtccacgcagggttatttttatttgaatgcataaccaggactcggggttttctcccaaaagattccagtngggggcagcaaacattagcatggatctcaagcttacaattcttttactgtgtgagaatactttaaaaccgtttattaaaaagacttatctatg

SEQ ID NO: 2902 - DNA, 115 bp, Homo sapiens
  misc_feature (1)...(115): n = A,T,C or G
gactgagtatgccttggnagtcctctgcttcngcctatcagagagganaatcatgacangagggntttccnagccntccagccagagatgttacngngatgaacccttccataaa

SEQ ID NO: 2903 - DNA, 406 bp, Homo sapiens
  misc_feature (1)...(406): n = A,T,C or G
gactgaggactggggacctnccgcctcacgctggtgagagctggagntcgcaggggtgcaccatcatgcccagcnccactgtttaatttgtctgcagaananaaaacgccctcttnctggatccctgaagatgactggcatnaagngagggatatcactttgtcttctggatcaccntttgtcatctctgcctacctccatggctaangaaggaaggagcngggccttatgtgacctgagcttcattgccacgtcttagngncagaggatcctgaaccatcctccaagagaagagtggatctgatgccctcttcagaccccagagaggaccaggcactcatgtggnatacatatatatacatacatacttacgtgtaaaacattcacacacataaaacagaaataa

SEQ ID NO: 2904 - DNA, 142 bp, Homo sapiens
  misc_feature (1)...(142): n = A,T,C or G
gactgagggtatataaacagtatganctgccgaaacaactctgagaacagctgagctgcctggaggaggngctccaacctctgaagctgtctgcaaaattgtgcacggagcgctgggttcccagattctgagcctgtcatcc

SEQ ID NO: 2905 - DNA, 234 bp, Homo sapiens
gactgaggagaatatgaaccagaagctactgaagttggaaaacttgctacgatttcatactatttgtaggcaggtgcacagcccaagtcaaagaagactcttagcatggtgtagacatgggtttgcaccggcttcctcagtgtggagagatctgctgggtgcccggtcctggcagacagacatgctcattggttcagctttgcatcagcacagacttcttgtaacaaaaaaaaa

SEQ ID NO: 2906 - DNA, 207 bp, Homo sapiens
  misc_feature (1)...(207): n = A,T,C or G
gactgaggtgaggactgacattagnaagccgtggngaagacattagaaacgtgagctttaactataaaggactcaatntttgcttcaagtgaacttccatggctctattntngcctntcatntagaaaggttttcttccctcccttgctaaaatgaacccttttgaagagcctggnggagaacctggnctgaaaacatgcacccctg

SEQ ID NO: 2907 - DNA, 360 bp, Homo sapiens
  misc_feature (1)...(360): n = A,T,C or G
ctggggcctccaaaaaaancatncatgtgcctgtctgnagcctaggtggaggacagattctgacagcngaggcatgangaccactatnaanatcggtctntaaggtccngaggcaatccatgttggttaccagggnggtgnccnatgccancacncatnggcttgctatttcttggttgantnccttttgagacangntctattntttatatgggtntatgactgncccncttgtgggcctatncntanggaggccagaagagcctgtgcttgcatcatgngggttccagggattgaatttaanttactaggnttggtggcaggggccttgattngctgagctatcttgccaacccagtt

SEQ ID NO: 2908 - DNA, 180 bp, Homo sapiens
  misc_feature (1)...(180): n = A,T,C or G
agctacctctccatcaccacgnctacctgcgngccaccttgtttcctgccatgataacaanggactaaaaacctntgaactgncaatncnagttaaangctttcttttataaaantggctggngacatgggggtctctncacagaaataaaactntaactaacacacccaaaaaaaaaaa

SEQ ID NO: 2909 - DNA, 223 bp, Homo sapiens
  misc_feature (1)...(223): n = A,T,C or G
aagctcctattctctagaacagcnnacgaacttctcagacctgcagncatgcnanctgggggggacgacntcaaaaangagtgaggtctggatannggantncngccttactacaaactgaangananactaantatgngttcntgaccnccttccctcatttcacattatgaatctgatttctccatttgtcaatgaatccctcanttctagattgccatta

SEQ ID NO: 2910 - DNA, 180 bp, Homo sapiens
  misc_feature (1)...(180): n = A,T,C or G
catctagcatagtgcttgacctacagcagaagttcaataantatctactgaatgaatgctatatactgnnatggttnacatacgtttacaatgctatggttaaaaatataagcattctccaaaggtctactacctagcgtgtaccacaataaaaactgttcaaaagctcaaaaaaaaaaa

SEQ ID NO: 2911 - DNA, 124 bp, Homo sapiens
  misc_feature (1)...(124): n = A,T,C or G
tatcccatgaccgctagagggtnactgngaaangcttgntcttcnttncttatgtacaagagttgnggatgaataccnggtacttgagtgctctaggcttgcatctgtgcacacggaccctcct

SEQ ID NO: 2912 - DNA, 254 bp, Homo sapiens
  misc_feature (1)...(254): n = A,T,C or G
ccccttcacatttgaacagaacattctgactgcggccacatcgtggttcctcgggcccatctagtttcagacggaagacttcatttctccactacttccctgaagccacaaagacctgccttgttagcaccaggaagggcctggtgtgtgcggnctgctgctgctgctgtcctccaagctcaagtcatgagagaagggaccacacacagggctgnactgngcctgcagaggcattgncctgattggaacctggg

SEQ ID NO: 2913 - DNA, 166 bp, Homo sapiens
tgagactgagcagtccttgctggcagtatctatcctgcaaagttgcagcaaagaccggattggtaaatacctggcctcttcgagagaaaaacagcaccttccccaatcacggtctgtcgcttgtatttgctcctgtttaaatacatctgtcttcctagtttatttg

SEQ ID NO: 2914 - DNA, 106 bp, Homo sapiens
  misc_feature (1)...(106): n = A,T,C or G
taggaaacggaccccaatatngtgatagttnccaaggactggtacaggatgggccancaagnaggaccagcaagacccatagagttccagctgtgaaaaaaaaatg

SEQ ID NO: 2915 - DNA, 172 bp, Homo sapiens
  misc_feature (1)...(172): n = A,T,C or G
ctgcctggcctgggcantgatgatgccccccntatncagnctgattgangaggaggtacaggtggacaccggccttggnnacattacacactgncagaaagtncaccccangtnnttantngatgacagtgaccattgtgactcanntcnaggacatttataggtgacttgt

SEQ ID NO: 2916 - DNA, 120 bp, Homo sapiens
  misc_feature (1)...(120): n = A,T,C or G
agaggggcaaaaccagctaattctttcccttgcttttcctcctctaacctcaagggggaagaaagctggatccggagcccgctataataaatgaatnggtttttctccacaaaaaaaaaa

SEQ ID NO: 2917 - DNA, 442 bp, Homo sapiens
  misc_feature (1)...(442): n = A,T,C or G
gactgaggctttttatctctccggcaaacaatttcaaatcatattgaaagcaataacttgaccggctgcaaactgctgctcatgaaatcttcaacaataagagcagacacttgaatggtttcatatcctctgtccaagattaagtagataagtcttgcatcagattccattactgtcttaaaacatccacaacacgcaactgatagaagctagataaactacaaagtccctagcttctgtgacatgtaagaagcagtgacaagcaagcaaaatacagagtcaaaagacaaatcaaagaaaaggggcggggggtcgatggtctgaacccacagaagagacactgtctcttaggagatcttagacaagccacaaagcgccggagatgtggctgcttanaggacactcgcctgcacactgnaaagnanctaatgccaccaagctg

SEQ ID NO: 2918 - DNA, 303 bp, Homo sapiens
  misc_feature (1)...(303): n = A,T,C or G
ctctgctttctaagtgctaatgtgctgggattgaaggaccagtgctggtgaattgggacagaagcaattcctcattacccagagagtgagctgcttgggagcttcagcagcangatttcccttcagtccttagctcagagccagctgggggancggaagtgctggcctggcactgagcgtgcctttgccagcgataagctggatccttacttaaggttgagtnnccacngatngagccctatcttanntcnncttctcatcgctggtcttgaancctgctttgtttaacttcctgctgtttgg

SEQ ID NO: 2919 - DNA, 109 bp, Homo sapiens
gactgagggatgaacccagtatcttcactcaagcaaggcaaactgtctagctcaccgccacactcccacgcctaaccagcttgaacttgatgaacacaggagaaaacag

SEQ ID NO: 2920 - DNA, 350 bp, Homo sapiens
  misc_feature (1)...(350): n = A,T,C or G
gcaggacatgttgganngacccagggactatgggctactntgcctgccaggntgccaggntgtacccntgangngttagctgangccccancagcactcnngcncggngatccnggacattgccttctggctcacacagacaaanaccagnnccaggaaaagaaanctggnaaanagattataaancagggccgggctgcagannaggggtagaatgctngcttgtgtagcactgcttgaggccctgagattncatcccagcactacaaatncncanaaccatggnnaaataggaaggcctngactatctggaatcattttagcaggngggggnggctcacacctgcaaa

SEQ ID NO: 2921 - DNA, 144 bp, Homo sapiens
  misc_feature (1)...(144): n = A,T,C or G
ctgatgaggtcacactatgcccaggcttggcctcaaactcattacatagtaangggagtgacctgggagttttcnnggagtcccctttcttggcaccntcttctttatggctggtgtggggaatggggaaccacccacccatta

SEQ ID NO: 2922 - DNA, 219 bp, Homo sapiens
  misc_feature (1)...(219): n = A,T,C or G
gacttcactgaatgactgaaaccccganagggcatactatggnccccacacttgggttcccagaccaggntcanggccagctggctgctggaattncacaccangggagtcctggtgtctccatgctaatcangaactccaggatttgggnctttgtattccgaatcaagtcaccacaaacacagcagctagccatcacaaagaaaagaaattgacgag

SEQ ID NO: 2923 - DNA, 103 bp, Homo sapiens
  misc_feature (1)...(103): n = A,T,C or G
cgttcactgccagctnctgggnaancagcactgttcnntgcngncggtcctcactcccatgcacacacacacgtatanttaaagatgacgcattaggagccaa

SEQ ID NO: 2924 - DNA, 121 bp, Homo sapiens
  misc_feature (1)...(121): n = A,T,C or G
ttatggagaccaaaggctgaagcccagacgcacgaagctctttgtgttcctggacggnggccatntgcctgcttgatnntctccctnaccatcttttngctgnatccccggcccattgctg

SEQ ID NO: 2925 - DNA, 352 bp, Homo sapiens
  misc_feature (1)...(352): n = A,T,C or G
gaactgagagctatgaagaggaagcacggntgttttcagntaccnagggaatgggactgagttctggaggcttnagagaaacaggacnntgagccaagcntccacccacagaccccaganggaccagactaccacaacacagtttaaagagcnggntntccatgggcctatgatgaggtggncctgtaacccattcacagagacatnctgcctccaatgaccagangaggagaaacagnacaagnaaccaanagccccttgagcaaagtgaatcattaaacaaaaacggcancagaaatttttatggggactaaatgacagncatgtgattatctaaaaaaaaaatttgtga

SEQ ID NO: 2926 - DNA, 260 bp, Homo sapiens
  misc_feature (1)...(260): n = A,T,C or G
gcaactgttgccgtttcagagcangaanctgtatntcgngttctctttatgngttgttacccaaggagnagcccagaaaccaangcnnggagtaacttttacaacgcgcatttgnactaaaggacaggttaaaaanttcacagcagaatactactgtnttttctaagggggacgggatctcctagatccgtcacnaaagacgctttgcanactctnaaaagangccttttactaagnaatctaaccacctcaatgttttc

SEQ ID NO: 2927 - DNA, 552 bp, Homo sapiens
  misc_feature (1)...(552): n = A,T,C or G
gactgaggctcctgcatctctcagtcatcctgtttaagtgctacgcggagtgaaggacaaaaagtagaagccaatgatcctgctagaggaggaggcggctgtgatgtggaacatccgaaagtgggagcacctcaaacagatacaccttcgggtatcaggtcacctggccccgcctctggaacctgccggccatcccggcagcacagctcctgcactgacacagaccagggaactggggctaaggcaaaacctgacgttccaaagtagaggcgacgacttgcatttgtgagtctgaagacccagttnggctctaggtgtgagcacacagtggcctgcctccctttctcacacagccacactgctgtactggaacaagcggcaggcagcacctttaaggggtgcttcctgggagtctggtgacagcttaaggaatgcagctccaccatgtgcaaatgaagactgtgccttnaagctcacaagctaccccactgncccaggaaccactctgtggccagggacaatgctncccaaggcctgcaaagagatgaccta

SEQ ID NO: 2928 - DNA, 169 bp, Homo sapiens
  misc_feature (1)...(169): n = A,T,C or G
catcagacaggaggagcnttggagcttgctcccagnctgcctagcctgtgtctagtgccnantcaacatatttttngagggctcacaacgaanagagaantggtgtttncccacctccccgaaaaacaatttttttgnggggggggccctactgaggaggataaaaaga

SEQ ID NO: 2929 - DNA, 183 bp, Homo sapiens
actcaaagcagtacacaggacaacgatgcagtggtttgctctgtcactacctatcctggaagacaggggtccacacctgccctctcagaatacagtctcagaataggtcttgtgtggaccgccatcctcggaggcttgtagttgtcactgtagcccagatctccctgtcttttttttttttaa

SEQ ID NO: 2930 - DNA, 265 bp, Homo sapiens
  misc_feature (1)...(265): n = A,T,C or G
cttacatcagatggatagccntaaccacatactgccataggcactgancactgcttctgctttgcctggccatctcatacctgtgagctctatgctcacttcacaaccattggcctcttgccccattacagtcaaaagctgaggaactgccatgaatcttgcccatgatcaagccaacactggacagtcccgagtccattccacatgaacagaagtcaagctattgttgttgtttttttaaataaggagataaccagaatattca

SEQ ID NO: 2931 - DNA, 231 bp, Homo sapiens
  misc_feature (1)...(231): n = A,T,C or G
agactgacaggacctttctgtgnccatggagcacgtgcaccttagggtttcttccagcatcagtgttctcgagatggttttaagatgaggtttgatgtcaacttctccagtgacttctgccctttcccctgtccccagccgcaggtatcagttcctcttttggtgtcatcatttaagaagccttagaacccctttttttggatattcagtaaattccaacaaagagcccca

SEQ ID NO: 2932 - DNA, 326 bp, Homo sapiens
  misc_feature (1)...(326): n = A,T,C or G
gactgaggtggatcggcagcctggttaaccatcgtgtccttgatgtgagtcacacctaanatanactctgagttggacggagtctgatcatctcgccagttgacacagncagcgtgagcaggtggaatttggctcttcctgaaagagctgctgaagaaggananctgantctnnnggtagcagcagctgccnttgggttccccacaganctanggngcagcatgtacctaanactgaggnaagctncttcccaggataccaggatgatgaattatgttgtcacaggttcccttgcaagaccctatnccccccccctttccaaaatt

SEQ ID NO: 2933 - DNA, 110 bp, Homo sapiens
  misc_feature (1)...(110): n = A,T,C or G
ttcctctatgccgggacggagttgtagatgntaagatgaccaaagtanaggacgctcncgaanagnccnagncgcangnaggagggcctgcatntgaggagcatcacgta

SEQ ID NO: 2934 - DNA, 315 bp, Homo sapiens
  misc_feature (1)...(315): n = A,T,C or G
gactgagactcacttctaaaggtcagtatgaaacactggcagacctctgcccaacagcctactgaccaccagacgaaggacagaacgtcactcttccaaccagacatccgagaggatgaggaccaggctcaaacctaagcccagcaaagtgatnaagatgagagctgtggccgtaggtcctgcttgtgacatggacatgaggcatcttggtttncagatggggaaactgangntggagagaagaggtaacttgtccaagctcacacaggtggngcctaangatcatagactgcttgggatgttgctggccctctg

SEQ ID NO: 2935 - DNA, 363 bp, Homo sapiens
  misc_feature (1)...(363): n = A,T,C or G
gagcccagcccacagatcgtggacttcccatgcacgtcagtggcagcacagaagtgagacttccacatgttctccagtggcagaatggaccacagacctccacatgacctccagcaccagtgtgggaaaaggcatcactgcggtctcctgctgcagccctgattatgaacatcaacatggtctctggtggcagcatggaccacaaacatcagtatggcccctaacatttgtgtgtctatgcatgtgcatattatttatattatatataatataaatatttatacagagtatatatgtactctgtataaataaaagtcatgtgtattatatacatnnaatgtcnatatactctataaaatatag

SEQ ID NO: 2936 - DNA, 125 bp, Homo sapiens
gactgaggcagaaaaggatccagtaacagggtgagctgtgagatgcagggaccaaagccatctagagggaaggaccacctgtggcctccggaggagaggggggcggggcgagaaaagaaaaacaa

SEQ ID NO: 2937 - DNA, 342 bp, Homo sapiens
  misc_feature (1)...(342): n = A,T,C or G
ggaaaactttcagcctcgtanctgagggaggaccctgaggaacatctacaacagtgaaagcgnnacttcttggncttggncataaaggctgaatatagagcagttncnttntgacgancaagcngaggctgcttaagttctctcagcgctgcttgcagtaagtgatccatccacgcacacctgaagacaaaggnaccgagagcatgncactgatttnttgctgtgntntngnaaagagggngtntgtngatctatctttccaaatgtgaatnttgngaagattcnagaagaccttaaaancntagattatagacatcttatanatttcaagagctttataag

SEQ ID NO: 2938 - DNA, 428 bp, Homo sapiens
  misc_feature (1)...(428): n = A,T,C or G
gactgaggtttaagtatgactcggntgcgattcccacactcctgantcttctgctggaaggatggcctcatgaccaggttgacagacagcactctgtgtcggtgacacagaactctggccgaccacactgaagcacgatgctccagcaggtgaatggccacagtttaggctctgatgccgaaggtagggcctccctcaagggagacctaagggagttcctgggtggggagatcccactgcaccagctggatgacctcaccaaggtgaatcccgtgacactggaaacagtcctgaggtgcctgcaggcccgatacacagaagacatattctataccaangctggctgtaccttggtagctntgaacccctttaagcacgtncctcaactctatgcaccanaactgatgcangagtaccatgctgcacct

SEQ ID NO: 2939 - DNA, 378 bp, Homo sapiens
  misc_feature (1)...(378): n = A,T,C or G
actaaaggtggctatantagcggncaactttgaacttgcggagtacntgaagaaccacnaggagacagacattgtaccacttgcaccaaccaggaggcccatctcggnggctcctncctgctncnacngtcctaccatgggctgggcccagncttgcacagtgnatgagctagccggcctgcgccctccagngctgggcttccacaggacctgcagctggggaacancctcactgnaccggcagtggtgagcccttgatggtngagntgncccatgnaggngctctgggatggagcttnttgggnccttgtgangnagcanatggnanntgcctctcagtgnctatgccntcaccntgtttttgggttgtaaaaagga

SEQ ID NO: 2940 - DNA, 244 bp, Homo sapiens
  misc_feature (1)...(244): n = A,T,C or G
ttaacaagcctccagaaactgggagccaggagtctggccttgctacatnttctgccagagaactgagaaccacttgcctgtncgccagctgagctgntgaagagcctactttgcaactnaatccagctgaaacaagcaacagaactcagccaaacaaagggattgggtccttgggttctcccccccaccccccttatgttcagngtcgtacattaaaatttgaaccttgatcagaaaaaaaaaa

SEQ ID NO: 2941 - DNA, 114 bp, Homo sapiens
  misc_feature (1)...(114): n = A,T,C or G
catagctagaattctncttgagattacacatcaaggncncanttttnacttaanaggaagggtgctaagaatttgcttttttaatttgcctgagttctggactttaatggcagg

SEQ ID NO: 2942 - DNA, 387 bp, Homo sapiens
  misc_feature (1)...(387): n = A,T,C or G
ctatgagctgttccttggaggcttccntaatgngaccagngtggattactntncagtagnggnggcagncatgcaagntcgntatgcccatgtacccagtctacgctggnagaccatggatgntcgagcactggacttccctagtgggtnttttgatgttgccctcganaagggtactctggatgccatgctggctggnnagccagatccctggaatgtatcttntgaaggtgtccacactgagnaccaggagctgagtgaggtaagccggntgctagttcctggaggccgattcatctcaatgacttctgcaggtccccactttaggatcagacactatgctcaatcccgttatgactggncactgaggcatacaacctatagcag

SEQ ID NO: 2943 - DNA, 127 bp, Homo sapiens
  misc_feature (1)...(127): n = A,T,C or G
tcacccactacaactttcagangaangccatgactgtgangganttcaggcanctgtntaacagcttnaacnactggactccaagatacttggattatgaatatttgggnacgcaaatagtgggaat

SEQ ID NO: 2944 - DNA, 385 bp, Homo sapiens
gggctgcggtgaggaggccgttacaagaaggatgctcaagcaatgtttgcatctctgcctactgtcctgtgtacagagcttctcagacaccatcctttccaaccagggatggcgtgtaaaaagaacaactatgaaaatacccaccgtaggttgaaggataattgggagactcagtgactaaatataacagagagcctggatcagaactggggtcctgggaaaagcagcagagatcacattctgtgacaggatctgtttacagtactgaatcaacaatcttttgtttggttaattatgatttggcaatcaatgcaagatgtggacattaggggaagctggggaaggacagaagagaactacaaaataaacataactaatttcaaaa

SEQ ID NO: 2945 - DNA, 173 bp, Homo sapiens
  misc_feature (1)...(173): n = A,T,C or G
tccgtactcacagttcanccaccacaaatcctanngtgnattgctttanaaaatcccccaatctgctgtggccccactgctttcatccaaggtcaagccctgagtctgnttcctgggacacagcttttgttgtaaaaccatttntaattcacccttcactttaaaagtattga

SEQ ID NO: 2946 - DNA, 115 bp, Homo sapiens
  misc_feature (1)...(115): n = A,T,C or G
atgaaatctagatgccctgttctgnagtgnntgaagacaggtacagaagnacttacattaattaantaantaagataaanagatnanctttaaatacaatgattgaataggtaaa

SEQ ID NO: 2947 - DNA, 300 bp, Homo sapiens
  misc_feature (1)...(300): n = A,T,C or G
gactgagactgcctgatgatactttcccagcacaggaaaagccatcaagaaggaccctgtgatgctatctttgtcancctagaatcattatcaagaaagtctctataaggaatagtctactttggnttaatctatgggggattgccttantctangttaatatgatgtggtattgaccctgcccactgtgggcactnccnttccctagccagtggnttctcaactacataananttggagnaatcatgatagaacacnanngaangaactgaaagtgtgaggactcttctctgaccacag

SEQ ID NO: 2948 - DNA, 272 bp, Homo sapiens
  misc_feature (1)...(272): n = A,T,C or G
taggaactgagctatcaggagtctgccacctctctgccttgctgatgcacccaggcagggcgtcacttggtttgcaggagtacatgaccacagatcanagccattggctgcacagatacctgactctgggctctcaggaagactcaggcagagatggggagtcggcctgcaagctgggacgctagagctcacgtgcagttctccatttagctaggaggtttccagggcaaccaccgaagcagtaattaaagatgaagagctaaaaaaaaaaa

SEQ ID NO: 2949 - DNA, 150 bp, Homo sapiens
  misc_feature (1)...(150): n = A,T,C or G
agactgaggctttttttaaatgaagattataanaacttggggctagaaagatggctctgntggtcaagaacactcactgaacacctggaaccctggcttcacctcagcatacccccacaaaaaanttactgaagagaatagaatgaaaat

SEQ ID NO: 2950 - DNA, 163 bp, Homo sapiens
  misc_feature (1)...(163): n = A,T,C or G
gactgaggtgggttcgggctgaggtagcagcctgggcgnaggccanngttccntcttgtgganncnncaaaggctnngacaggaagcaggnctggatncatatatactactgcntngaancagatgaatacggagctcggtacccggtgatcgaaggtcctat

SEQ ID NO: 2951 - DNA, 137 bp, Homo sapiens
  misc_feature (1)...(137): n = A,T,C or G
tactagccatctaagcncttnagcaaagnatactatgaatgcnanntgnnaccatggagganacaatacggctnagtcttannccaccagcccctctggaaaccaggcctgagnggaatggagtgtattgagaatgg

SEQ ID NO: 2952 - DNA, 284 bp, Homo sapiens
  misc_feature (1)...(284): n = A,T,C or G
tcagagcgtcgcagggtanttgactagccaagnagaaatcccangnggtcactgggagnctgnncggacacactgagtngtntntgcntcngggaantggaggnaggcctctttctgctanaatgaagtntgacattcactgggctacctganatcncccctnncaacaaacanncaactgcctgncncactgncttccacnaggaggcctctgacttccacatgtgcccccacccaccctataaataagtaaataaataaatgtagtgagaaaaaaattaaaa

SEQ ID NO: 2953 - DNA, 422 bp, Homo sapiens
  misc_feature (1)...(422): n = A,T,C or G
acacttattgaacattttcttccgggnatgggggccttggacccctggaaacccgaaaccccaggatggcacaaatggcttgggctttttggggcccccctttacaggaaccctncgttctttttgcccttttggcccggggccagcntggcttggccccccttgggaagaaaggggaatggaaccaccccggaanaaaacttggggggccctttaaccntttaaggnggggccttaanttttttnggccctttnaanttttngggggnnaaancnaaaggggaccttgggaaaaaccccccnaaaaagggggggaaaaacntncnngggaancccctttgttgaaanaccccttgnggggttttttttccccggggggagggggnaacccccccccccccctttttttttttccccagggg

SEQ ID NO: 2954 - DNA, 122 bp, Homo sapiens
  misc_feature (1)...(122): n = A,T,C or G
gcctccccaaaatgaatgcgcntaatttggatgacagctgaccctcctacatacantctgcagatagagccacaaganggatgtcatccggcggacagcntggaaaggagagtgacacagct

SEQ ID NO: 2955 - DNA, 235 bp, Homo sapiens
  misc_feature (1)...(235): n = A,T,C or G
ggtgatacatatttcaacagnagcggtcctttctctgtacaactaaagcagagactacataacccaccaggtaccgcctccgaggggcaagcgactaggttgccatctctgtagtagtcctctcctacacatccgccgagaatagtattagcggntggactacaaatcccatagcatcatgngctccttcacccttcatttttgngggagnccccgccccggtcactttcattgg

SEQ ID NO: 2956 - DNA, 129 bp, Homo sapiens
  misc_feature (1)...(129): n = A,T,C or G
tgagactgagaaagagcctcntctgggacagtggaaatggctgtgaaacagtgaagcttcaatccacggtttcctccagcaggaccaactgaatgatctcaaaggaacaataaagacttgaatcttgta

SEQ ID NO: 2957 - DNA, 304 bp, Homo sapiens
  misc_feature (1)...(304): n = A,T,C or G
tcccgactcacacagcanaggcctctggaangagcatgcgctgaaccttccaggctggaagctgtgggtcccagttncaggccgccccagcctactaggccccagcctgtnattgnnccaggactctgcggatgcagaggatgcanatacaagcctgtggcatccgnacacccaggccgccatctacagcaggntttatcatttnccacccgacccacaagccatctgataaacaagtgattacttcagatttgcatataataaatatcacccccaggaagggtggtagcgtagaaaaaaaaaa

SEQ ID NO: 2958 - DNA, 303 bp, Homo sapiens
  misc_feature (1)...(303): n = A,T,C or G
tgagattttagatgatcacctncnntcctgcttgagcttaanaacttgaagcnngatgagcttgctgntgncagcatggaaggagggttcacacatgcncagttagttacctnatgtcagagctccgaagacaagtgtgccatctatgtcntaatggactttagtggcgttggtttcttccttgcttanaatgaggcactttttgtcatttgtggaaacttgcctgtaattcattttcctcactgcagtattgagagttataccaaattgaaaagatatgaatgaatatcctaaaaaaaaaaa

SEQ ID NO: 2959 - DNA, 521 bp, Homo sapiens
  misc_feature (1)...(521): n = A,T,C or G
gactgagggtggaagctntgagagacgcagcctnntgctgntgngcaggagaaagatttcttctggagangatccacagtatccanaacagccgggacatgaggcgnattactctgatggagaangagagganctaancctnnctgccnaccgtntgatgggccgnacnctcacnnnngnggtctctggttggaancngatcctgaaacccccagctngaggaatncttgaagcatgccactgaggattatagacnaggtggncagcaagttcctagatnanctggggaatgccaagagccacttantgncantttacngtgcctgctcatnggaggtgccgcctgggccggtggaccanaagtttnnatcgatagtgatcggttgcgctcttgaggatcanaaganaatcaagaggcgattggagactctgntgaggaacnttgacaactccgacaaggccattaaactcctagagcatgctaaaggagctgnntncaaaagcctacagaacactgacgg

SEQ ID NO: 2960 - DNA, 175 bp, Homo sapiens
gactgaggaactgtcagaatccctgctgatggaagtgcccaggtgggcctggcggcagacatcttggaatcccaccaatgtgaagacttgagtatcacaatggctgcaagttcgagaccagcccaagctaaatagatcctgtcaaagtaataacagtaatgttgtaaatgaaaaa

SEQ ID NO: 2961 - DNA, 533 bp, Homo sapiens
  misc_feature (1)...(533): n = A,T,C or G
gaactgaggtttctactgcctagaatccggccttgcagatcacgtgctggggaggccgttgccatggtaacggagcaagagatagaggccatagggaagaccttggtggaccccaagcagcccctgcaggcccgcttccgggccctgtttacacttcgggggcttggtggccctgatgctatctcgtggatcagccggggctttgaggacagctctgctcttctgaagcacgagctggcctactgcctgggccagatgagggacgcacgggccatccctgtgctggcggatgtgctgcaggacacgagccaggagcccatggtgcgtcatgaggcaggggaagccctgggggcgattggtaacccggaagttctaggcctcctgaagcagtattctacggacccagtggttgaggtggctgaaacgtgccagcttcgccgttggtcgnctagagtggctacagcagcacccgggggaggccacatgtgcaggaccctaccttttagtggacccagnaccccctgcagaaaaca

SEQ ID NO: 2962 - DNA, 182 bp, Homo sapiens
  misc_feature (1)...(182): n = A,T,C or G
agactgaggcttgagagngactctatggcttgcttccacacacttaaggacccgaggtcnaatcaantctcaagtaanacgctgggtgcatgagaaccaaccttacaaatttatcctctgtcttcantggngtgacaggcgccaccctgaaataataatgaatccgttaaaaaaaaaagttt

SEQ ID NO: 2963 - DNA, 148 bp, Homo sapiens
gactgaggtcgaatcttcctcatgtctacgagtggactaaatctggacattccccaggctataggcactcaacaaacagcagttaccctcagactatggcattattgaatgaatagaagagaaaaggccttccaggcaaaaaaaaaaa

SEQ ID NO: 2964 - DNA, 263 bp, Homo sapiens
  misc_feature (1)...(263): n = A,T,C or G
ttgctaatcagagaanaattgatttttgaagacagcatttgaagacagtaaaactgtgtttgaagaatattaaaactggatcgncaagatgactcantgggtgaaagacatttgcnaccacagttcaacccctgagatctgcaggttggaaggacagaatggagcctggcaggtgatcttctgacttccacgtgcacactgtggcatgtgtgtgctctgcccccaacaataaataaatgtaaaaactgtgcgttaaaaagata

SEQ ID NO: 2965 - DNA, 386 bp, Homo sapiens
  misc_feature (1)...(386): n = A,T,C or G
ctggacctgcctagangctggngtggngcggctgcagatgctgcttctccagcnggatcagaggcnnaggcagtctattcccctcaagggccagctagactgnngaatgnctcagacancanngagangctgtctccnncancatgatggctantnctgttctctncngacatgtccttganactngntctgtacancattgctggncngcnaactaacaantacgnctgcctntgcctcccaagtgccnggcntttttngattttagagatgacctatccntgtatccctgcatgtcntggaactccccangnttggctcttgaactcagcagagatcttgcctgcctctgccctcgagngctgggattaaaagcttaccccact

SEQ ID NO: 2966 - DNA, 121 bp, Homo sapiens
  misc_feature (1)...(121): n = A,T,C or G
gttcatttcccagcacagacatggaagctgacaagcggnctgcaactccagctccagggaatctgacaccctnacacagacntacattgcaggcanagncacgtaatatacataaataaaa

SEQ ID NO: 2967 - DNA, 180 bp, Homo sapiens
  misc_feature (1)...(180): n = A,T,C or G
tgccccctacaagacctgcgtctagcaccagtttccaggncattcctnnacaantntgcacccccaggttacaagcctgcccctgacacttcatttcctaacaaccaccaatcaggaggaaagcagaagcccatggtttggctcccagcaccagccanttatggttaaaggctataattg

SEQ ID NO: 2968 - DNA, 330 bp, Homo sapiens
gactgaggaccccagtggattccctctgtgctgcctcacttttcctatctgcatcagaggagccccaggtccccggggttggccaagagaagagaagactgagagatgagaagagtaaggctcagagagctgaggcagaagctcactttccctaccacttgctgcctgctgcaggctccatgtgccttgggacgtgaacttcacaccagtcccacaggtgaggatggaacagggacgcagccccttggccctgtggctgcaaagcctatgccccagtctcacccagtatctaagtgcggtacttactctaacaagccagtggccacaaca

SEQ ID NO: 2969 - DNA, 212 bp, Homo sapiens
  misc_feature (1)...(212): n = A,T,C or G
aactactaccgcagactggcaggatcctgggcagcccnnaccttctttctaaaacaccatggctngaatnctcgntgctgctgctgctgctgctgngctgcccactangctgagtntttgcnttcaggtntcacattccctctagaatactgcgttgncctnctggcaaaccacgcaatccactacttgggtatngccggagtttacatgtc

SEQ ID NO: 2970 - DNA, 126 bp, Homo sapiens
  misc_feature (1)...(126): n = A,T,C or G
tttcagcccagccagggctctgtgcgttanacnctgtcacctctaccgacactaagantagnananacaggangatnncctagagttcgatncctgcctgnctgtatagngagaccctgcttcaaa

SEQ ID NO: 2971 - DNA, 155 bp, Homo sapiens
  misc_feature (1)...(155): n = A,T,C or G
ataacaacttaaatccagggctntaggactgggatnagcagngatcccatgcagncagaaccatgagtnntgcnccatcgccnnnagcacctncattcgaatagtccatncttngatgngcactagaagagagcacctccattcgaatagtccat

SEQ ID NO: 2972 - DNA, 347 bp, Homo sapiens
  misc_feature (1)...(347): n = A,T,C or G
cactccccagctagacgttncatcacagcctcnnagataantaaccnttgctncagtnctnactcatgatgganagcttacatttcgccagngaaccntggnncttgtgnnttttagananaaagaggcacctgctgcctnatgacanctcncannaaacactcatttnanagtcccagcccttctaggagctaatggatgaaagccctganaaggaaagaatcacccaaggacacagtttcagatgatctcaaatgaccaagcaaatgacaggcccagnanatgacagctcttttccaatncacaggctggggnggngtttacccataatacagccccttgggggg

SEQ ID NO: 2973 - DNA, 114 bp, Homo sapiens
  misc_feature (1)...(114): n = A,T,C or G
attgagggaactccaaccaagtgagtggcgnggggccgaggctgccagctctgtccacccgacttctngaganntaatgggncctgngtnaatgcggatgagtgcagccaccgg

SEQ ID NO: 2974 - DNA, 333 bp, Homo sapiens
  misc_feature (1)...(333): n = A,T,C or G
ccctatcaattctgaactttatgatgactnaagacttnattctacagntntgatnggcctggaactcccttngtanaaaggctagcctgggactgacagacacccacctgcttgngtacagaaggaaaaaaatcccacctattgcagnggnacacctgtaatcaacacttttggaggtagaaacaggaggaaaaggagtgcaggccaacattggctacaggaaacctgtcctcaaacaaacagatgnagctatagtggctngcttctatagngcctaagcacacaccttanagatgcatgctcaccagcttatcccaggaaataaagactctg

SEQ ID NO: 2975 - DNA, 218 bp, Homo sapiens
  misc_feature (1)...(218): n = A,T,C or G
gactgagggaggaagnctgtctgcccaggacacatggtggtgtncaaaggnncnnctcncctngagtgactgtgtcctncattggatctcancntcgtagntcctgacctcaagcatgcgcatagccgnancnggacnggannatancctgccttgcgangacctgccttcagagntgagtacacccctgcctgaagaaaggacacttcatgccaagg

SEQ ID NO: 2976 - DNA, 287 bp, Homo sapiens
  misc_feature (1)...(287): n = A,T,C or G
caagcatccttggtggtggcagcgntggcagcacnnncaacagcagcagnangctagtatanagcagccntaanancantagcagcagcagnagnggggggtggcancaatggcagnatgcttanacagaaggctntgagatagcctctgctttcctgaattccatgtcctcagtaccgagattcatctgctgctgggtccaggacttcccatatctcctttatcggatactgcagtaaaacttcgatgctccagntngagactgtaccagcaataaaatgccattt

SEQ ID NO: 2977 - DNA, 276 bp, Homo sapiens
  misc_feature (1)...(276): n = A,T,C or G
caccataggggatgcaggatnnacntgtgaagatgatgcgagtagccctgncaactgnggatanngactacgaagnctatagagacaactatgaaaatggcattagaagttaaagactatattcacgaggatctcaaagagcatgatcctgggataccacagccacacaggcgactggatcattaacctcaaggacccctagaacccnnncctgaaacnccgtntcgatnaacagtaccatctctgccagtctgtnagcnggatgaaagtcctgat

SEQ ID NO: 2978 - DNA, 184 bp, Homo sapiens
  misc_feature (1)...(184): n = A,T,C or G
tttagcctgggcagaggncatagtnctntctgtnncatgctccatacgctcccgaggactgcctatngnnnngctatctgaganacggagaagaggacttcttngacagtgctagcacagctaccttncngaacacccgncctctgcaagacctgtctccatncagntctgccccggacctgca

SEQ ID NO: 2979 - DNA, 131 bp, Homo sapiens
  misc_feature (1)...(131): n = A,T,C or G
aaaccttaaaagttgncctctgaccttcannggagcccacagagtgtgcatacaaccnccagtagaagtgatgaggactcgagctcaagcttttttttttnttttttnctcagcacttaacgccgccaagc

SEQ ID NO: 2980 - DNA, 419 bp, Homo sapiens
  misc_feature (1)...(419): n = A,T,C or G
actgagaggccagagacgatcaggcaaaggacacaccctgacctgnggtcgccatggagcctgctggtacccacacctgcctagacagccagtgaggaaggcncagcaagcagggcttgccgagatgtggtatagatacctgcactgcagccctcacctcagcgaatcagcgtttgcactnccctgtgtgcgttcctgcatgantgtnancctctgaaccgnagacgctgtcctgtgtcccttgccctgngcccatgcctgncttggttagcagctttaggtgtcctcctctttgtctctccctgtcttcctcctcagtctgcaggaagtgcagtctcgcggtggcattaaacctctgaccacatgtgaactgggaatttacccacacgccacaccaacatcttaagggggagcggggg

SEQ ID NO: 2981 - DNA, 169 bp, Homo sapiens
  misc_feature (1)...(169): n = A,T,C or G
ctccaagctgccgtctcacangctgcatgnctggatccttgnagactttnnacaaagaagcagancgtgttccatgctgnnttttgagtaacttctccagatttcttcagcacaggatgttggagaatatcatgtgaganaaattaaagngtatttcagctcttgattg

SEQ ID NO: 2982 - DNA, 166 bp, Homo sapiens
  misc_feature (1)...(166): n = A,T,C or G
ttcagacccatgtatccanttttgctcagccatgaagctcagctcagancctaccacagacnggtnacctaacactancggcgntggtganatntatgggacctcttanctaacacnttgtangctcngatggctccacccccatgngtgaacactggcaagtgga

SEQ ID NO: 2983 - DNA, 150 bp, Homo sapiens
  misc_feature (1)...(150): n = A,T,C or G
gcctcgaatctgctgnatgcnacgctcggntccctggtgatgcnaagaatnctantcaggangctcctattctctagaaagtataggaacttctcgacctgcgggcatgcangctgggggggtctgacgtgtnncaaggagtgagggctg

SEQ ID NO: 2984 - DNA, 218 bp, Homo sapiens
  misc_feature (1)...(218): n = A,T,C or G
acgctgggagccgaactcagaaagctctgttgagctgcnancgctnnntaacagangtggcccttanccgccatgnnccagccccatacactaatnttttagattntncctacnactgccttttggacatcctcccaccatgttattatgcgtggattacatgcttatgggccgggannctatcagagcntacntcaatagctccatttggcaaaaaa

SEQ ID NO: 2985 - DNA, 238 bp, Homo sapiens
  misc_feature (1)...(238): n = A,T,C or G
ccacgatctgtactganaatacagcgcaggcncttaaccttgctgagcgcatgcaggaggccatacaagctgatgngctccctgcagangcttattcaacaagacagaggacttntanttcatgaagaacaccatntctgaccaantnctaatgnacnggacccagacctgcacgggccaggaaactttttacccnttaganngggnacctgagcttnaagctgttacttgaaccaag

SEQ ID NO: 2986 - DNA, 119 bp, Homo sapiens
  misc_feature (1)...(119): n = A,T,C or G
cgccaatatggagagaccgttcnccttgcttnataantaggggaactnacaanaactgnngagccttgancnggagggggtcaacattttagaaagagngagggctggctctggggctt

SEQ ID NO: 2987 - DNA, 135 bp, Homo sapiens
  misc_feature (1)...(135): n = A,T,C or G
gtcgtcacttatgcagcacncactctcattcntgatatggaccntctcccanngnccagtgaagaacanagatanannacttcttganattacacatcaaggntctcagctctngacttaatgcaggtagctcca

SEQ ID NO: 2988 - DNA, 260 bp, Homo sapiens
gactgagatgggacatcaaggctcactggccaagctgatggtgaagccagacgctctcctactggtccctgataactccaaagctgggtcctcttcccactgcccccaactgctactcacaagaactgtccccagatgaaagagaaagtgacgacgctgcttgctccttccataagctcttggggggaaatggtggggtccaatggaggccatggaataccaataactcagagcccagccctccatcagtcacccacctt

SEQ ID NO: 2989 - DNA, 290 bp, Homo sapiens
  misc_feature (1)...(290): n = A,T,C or G
gactgaggtggggtctttcattatgactgtgaagaagcaccttgtgctggaggaggtcagatccagcctctcagctgcccggtccagcctgaaaggagcttccagcagcccaaggccggatatgtcagtctcacccacaagcccctccccctcccagcggttgaggactcagaggccaaatttgnnatcgccnggnctatgagcagaanntnccnccatggatgggctttttntgangattagcattgngaatgnggtgaacncnanccatnttgagccatctaccatgg

SEQ ID NO: 2990 - DNA, 104 bp, Homo sapiens
  misc_feature (1)...(104): n = A,T,C or G
ccaccccatgagagacccctgnaggaactcactgaccaagtgtgnggcctacccacagtccttgaaggatggctcatctgagnttacntttacgagtacatgtg

SEQ ID NO: 2991 - DNA, 181 bp, Homo sapiens
  misc_feature (1)...(181): n = A,T,C or G
agccttcccaagccagaaaacaggctgagccagaccttgactatgctacaccactagggagagaanctangngggagcctgcctccctggatcnttctattgtnaannnactgccactgntgctacctgatgggagacngactagctgatccagagnctacatctcgatcctacacatggg

SEQ ID NO: 2992 - DNA, 188 bp, Homo sapiens
  misc_feature (1)...(188): n = A,T,C or G
acgggcaatccacagcaaacccttggtgtcacatttctgccagtttttcaggggaaagagcctggtgaagactggctagtcgggctacnaagcctcactccttgacctaagacgggggatttgacttccgggtagttcccactcaccaattgcctcctccggagtatcaagttgcacctgctgggctt

SEQ ID NO: 2993 - DNA, 203 bp, Homo sapiens
  misc_feature (1)...(203): n = A,T,C or G
gatgtgtctgccatgcnnatgggacgcacggacgcacggacggactccacaagcatccaccggtcactgtcgccgcccnnagtgactgtcacttcaccgattgcttantaantagttgcggacncctnagngnntgangtttttnccatcncnanaggacngacgganggactnnacaaggtgcgcgtgtcgccgaggccgcc

SEQ ID NO: 2994 - DNA, 329 bp, Homo sapiens
  misc_feature (1)...(329): n = A,T,C or G
ggccaagtagggaagagccattnctgaccacgctgcaggaacntctggnatctnnggccacagntnancngnctttccagtttntcgaggcaaagactgaaattttgctggnatcagcttgcactganttcctgtatgcaaaccaagagtcctggccagngttcctggggggaaatgcttttttcccntccttcatganactattggaacgctctaggattactgtactctcacttttggcaagccctttttatctgagccccctcntgggggttggtttcgctggnggttggnttggacctgaatccttgacctttcttgggtgagca

SEQ ID NO: 2995 - DNA, 236 bp, Homo sapiens
  misc_feature (1)...(236): n = A,T,C or G
gactgaggatctcttggaggactctggtttgtatcaagttgatataaaatcagccagcataatgaataaaggttgcaacttagctggagagaaaattagtgatttgaaaggcaagcctgaggaaatgatgctgggtgtggctcagagcaatgaagaaaacaagaaagaaaggtcnagaggtgttcagaagacagcaagaaggtccaacatatttgtaacaggaaccactgagaggt

SEQ ID NO: 2996 - DNA, 266 bp, Homo sapiens
  misc_feature (1)...(266): n = A,T,C or G
ggatgccggaacacctcctgcccctcacataaagggcagggccatgtgtgatcatcagtcacggagaggacagcagaagcagatggagagaggagacacaaggtgcagagcaaagaggtggttgtgctaanatgaacctggaaagaagcagccccacccccaagttgttcacagacacaagaggccccttctattctgtccaaccggtggcaggggaggacagcaacatgtatttaggtaaaagcctgacactgaacaaaaaaaaa

SEQ ID NO: 2997 - DNA, 199 bp, Homo sapiens
  misc_feature (1)...(199): n = A,T,C or G
cttgccccggcagccctgaagctgggacccttaccacagatgcatgtggcacaggatccaacagtgcttccagcacccttaagcgaactaaaaaaacacggccaccttccttgaaaaagaagcaagccaccaagaaacccacagaaacccccccagtgaaggagacantaaaanttcatttccctttggtttcttcctt

SEQ ID NO: 2998 - DNA, 112 bp, Homo sapiens
  misc_feature (1)...(112): n = A,T,C or G
tgcctgaaggatgacagacangctgcctgccctgcactnncatcnnggatgacagnaaacngctgatcgagtctctngactaantacgnggtattgtgtgagccctacaaga

SEQ ID NO: 2999 - DNA, 417 bp, Homo sapiens
  misc_feature (1)...(417): n = A,T,C or G
gactgagatagagtcatccccggnggtgatgcaaagcaggagggggaggctggattgtccaacccacactgtctctggaaatgcaggtcctgtgggaaggctggtacccaggctccgttctgagcaggctgttttaggaaaggagaactcaccagacctgtcccagngactctacctttgttctanaaggcgctcctttcagggttgnggtacctgtaggttagcagaccctcctcctttcccacccacccaagngnggcccannactaacccaccatctcttggnttgagccctggcagttctgtcttttcccgaggtcctgccctgcatcatggcttgcttcccggagcacttccccttcanaggtctacattctagggngtaggctgatttcttctgnaaagagatgaatgtga

SEQ ID NO: 3000 - DNA, 355 bp, Homo sapiens
  misc_feature (1)...(355): n = A,T,C or G
aggctgcccgaacccttggtggagcagcatganctcatgcagaaagctgcagtcttagaangctatgtgggaatccaagtcctcgctacactaantcggactgncactgatgagagtncaaggcttctcgnncaangcanaggcacagaaattatactaaaatggatgctcccaaaagaacaagcactaacattcggaagataaaagaacacaanggaccctanaaganatatcaccaaggtgcagcacacattaaagggtactaggtatgtggaatttgtttaaatattttaccaaatccctcactaataactgagttagataaaatccaaaatatatgttcacttatacttgc

SEQ ID NO: 3001 - DNA, 165 bp, Homo sapiens
  misc_feature (1)...(165): n = A,T,C or G
actatggcttcttccgagacatnagnttgnggcccccgctcgtgntgatcggcatctatgccacggccctctcagcctccatgagctctctcatnggngcctcccgnatcctgcatgcgctggcccaagatgaccttttcggggnnatcttggcaccagccaagg

SEQ ID NO: 3002 - DNA, 360 bp, Homo sapiens
actgagcctccagctcccaggttcattttacaggcgtgggccaccctgcttgactttgttctggctccggatgtggaaaatccccgagtgactgactcctcctctggagtcaagcgagccctccatggagacactgcacacggcctggagacctggcaaggggagcaaaggccatttggcttgtaggtggcagtgctgggactctatctggaaactggttttcagaatccatctgttctcttcaacgtgtgcagaggcgattccctttagcagaatgctttgtgtgttccagagctctgggtggggctgggcaacttttcaaaggtggttggtgtgaggcaggcacctgcccaaaaaaaa

SEQ ID NO: 3003 - DNA, 439 bp, Homo sapiens
  misc_feature (1)...(439): n = A,T,C or G
gactgaggtgggacttcccagganncagcangctctccacnatannagccangngnaggatcngacatgacagnnnaactacngaaagcnatgctacanggaagcagtanacattnaacanatgttgcaanagacnttnctcnctangagngggactggctgaatcctgctcataggagntngtacaggactgtggncgctggagaactaccggaacttggtctctgtgnnancttgcatttccaaaccatctctaatctccttattggaacatgggaaggagccttgggaggtgaagggtcaggtgacaggaagcagagtacaaggtgagaagtcangaagcagattgaaaaccgtttctagggaatggctctgncatctatcttcagaggtccttacctgggctgaggctgcccaaaaaactcttcctaagccttgc

SEQ ID NO: 3004 - DNA, 249 bp, Homo sapiens
agactgaggttctttctaaggactctgttttctgaactgaacctaagcgaggaccattctccgggctatgcactcttcactgattcatgcattgagaacaaaggatgaagaaaaacttggtcttcatgatattatgtttgatctcttagaaaataagcatgattatctaaacatttataatacatggtctgtacattgttttaaaaagcttttcatttgaataagagatatggtgtatggaagattttg

SEQ ID NO: 3005 - DNA, 128 bp, Homo sapiens
  misc_feature (1)...(128): n = A,T,C or G
aacaacagagcatcgagttgaacaggaggctaanaggagaggtccactgggcagnnnaaagacggcgtnctggctgggctanataganggcttagngnttaanagcacggactgctcttctgaagatc

SEQ ID NO: 3006 - DNA, 451 bp, Homo sapiens
ctgagctttggggacaagctgggtgcaatgactcagccaacaggaagaaggagattgctggcagccagcgtgctggccagtactaggaattcaagacaatacagagctaagcgtcaccttcctgctggtccatttgcccatacatccgtccagtcatccatctggccatccgccccctacatgtttactaggttatccgggaaggattgttaccatggatcttccagggcagctcacctaatccagatgatccctcacagcccctagtgtagttggggagagccgaggaccagttaccatcaaatcaagaaagaaagggcttcaaaggattgaacctatctatgcaaagggccagaggtctgtctccaaaggagggaacgttctgatggggcaccgaaggatgtgtatgaggctggccacaaagttagcaagaaagctgtgtgcaggaaaa

SEQ ID NO: 3007 - DNA, 205 bp, Homo sapiens
  misc_feature (1)...(205): n = A,T,C or G
agactgagaccccagntggccttcttggtctttgtcctgggaacagcactggaatgcaggaaaggcggaacctcanaaagaccaagatcaagcccagctcctgcctcctcttgaccccgagaactccggacagccaggctctgagcctcagcttcctcatttgcagagcaggatgctaataaagttttggagggtgttgggatta

SEQ ID NO: 3008 - DNA, 346 bp, Homo sapiens
  misc_feature (1)...(346): n = A,T,C or G
tcctcccaaacccatggacctntacagggatcacagttctgccctaaactctggtgtggagtgcattaaaaggagccaaggggaagatgcaccaaggccctgaatctgggctnaanancangatcgngggnttncntaananaccctncctgncagnngnanatggcatccgnnaaaggcnccctgaaggcacangtcangcagcctagcacagacaccccatgccacctaatggacaaaggtggaacttcatgagagagcaaaggtgccagtctattttcnngcggaaaccctctcctgagaaatccagcgcttacctgggcaccacantacaaagaccagactc

SEQ ID NO: 3009 - DNA, 130 bp, Homo sapiens
  misc_feature (1)...(130): n = A,T,C or G
atgcccttatgcctgcaccaccgaagccgtacaagattcttccactgccggggggcanccccctcgnanccgcgttanctccnngagatccaaaccggtccagattccatccgtgccacactgaggtgcc

SEQ ID NO: 3010 - DNA, 370 bp, Homo sapiens
  misc_feature (1)...(370): n = A,T,C or G
actgaggtcctctggangngtgggacttgccgcctttgctgccactgtggatgancaggttctacatatntatgggctgngccctgggccttaccctttgcntnngtgnccagatcatcaanaagcaggnnactcgntcccaggagaaacgtgtcccaggagctcctgatagctccctctcccctcagaagaagcagacacacgtttctggagtgaagattttttacggatctcagacgggcactgccaagggatttgcagtggttcttgccaaagctgtcacctctctggacctgcctgtggccattattaatctgaaggaatatgatccagatgacagtctgataggagagntcactagtaaaaccgt

SEQ ID NO: 3011 - DNA, 242 bp, Homo sapiens
gactgaggagctaaggggacattcatggtggtaacacagaaaactgtgcagtgtggctccacactcaagggactgccttctgggacaagacatcctgcttcagcggctgtcttcttgtggggtatcttccaacacgctcccccagaccaggactcaggcacctggatggtgggctctcctgactgtcatgaaaacctgtggacttggtaaacagccttaccttcatcctggaaaaaaaaaaa

SEQ ID NO: 3012 - DNA, 208 bp, Homo sapiens
  misc_feature (1)...(208): n = A,T,C or G
aatttatcttgaggataagancttttgggttccanttttgnaaaagatggnagtantaaaccanccaattcagtgangttnggannaannttttgtctactacggtgattacttggcatgactgccagcgcanttgnagctctggtnctcatgacctcttacattgaagcatgtggtggantcttngnacctggactacattctagca

SEQ ID NO: 3013 - DNA, 125 bp, Homo sapiens
  misc_feature (1)...(125): n = A,T,C or G
gactgaggccccatggcacagagaccagcccctgctcctccctggtgacttggctatgttgctgtgccctgaagggtgaggggatgttgtgagttgntgacagtccttttggttcacccagagtg

SEQ ID NO: 3014 - DNA, 283 bp, Homo sapiens
  misc_feature (1)...(283): n = A,T,C or G
agcccaggggtcttgnggtctacaaatcactctctgacttgaanaanngganctgnaattnatanagtgctatcacanaacatgngnngtccnctgatttggaaaagcactctctctgtgtccagctanctcancacattccctgaattgcggatggtngactnnctaagctcctcatgagccagccccaagctctgccaaagaatgcnnccngaaaaatgaacatttttggctcactgagagttcgtccaaacttatctantgctgcttcagagggactttc

SEQ ID NO: 3015 - DNA, 194 bp, Homo sapiens
gactgagtggtgagaagactgaagccggtaaaggtgcttgctgccaagctggaggacccgactttgatcctagagacccacacggtagaaggaacaacaacaacaacaaaaacaattcttgcaagttgtcctctgacctcctgatgccgtgtcatgccttcaataaataactaagtgtgatgataaaaaaaaaa

SEQ ID NO: 3016 - DNA, 194 bp, Homo sapiens
  misc_feature (1)...(194): n = A,T,C or G
gactgaggagtccctgtctttcctcagtggcctgaagcctgagaagtctgccctgaataggtcttctggctctgagctgtttatcttgtctgaagcttgnctggactcctgaagagaccagacttttgtgtgtgaatcatggttggatgcgtcaccttccctccagccactcaataaatgcatggttgccggtc

SEQ ID NO: 3017 - DNA, 188 bp, Homo sapiens
  misc_feature (1)...(188): n = A,T,C or G
aattccaactgagcccggatgactactantttntggcggggnngtggcgacaagaatgggagaanggggtgcaggtacctgctggagccggaggccattccagacccctgtggtgaggctcctcccaccactgaaaggcccccccacgcanatgtncncagatagncccccacttggtgagggtgccc

SEQ ID NO: 3018 - DNA, 275 bp, Homo sapiens
  misc_feature (1)...(275): n = A,T,C or G
actgccaggaggcatgtcngtnggcatgtatactggccncctgcaacgttctgatttnnagtacgnggaagctattanntgctaccgaaatgccctcaaattagataaagataatttgcaaatcttgaggnatctctctctattgcngattcagatgagagaccttgaaggttatcgagagacgagataccaacttcttcagttgcncccaacaccagcgngctttcctggattgnatatgccatcgcttatcattttgctgaaaagattatgat

SEQ ID NO: 3019 - DNA, 126 bp, Homo sapiens
  misc_feature (1)...(126): n = A,T,C or G
tctgcacctgatttctgtgcttggaatcctcaaaancgtggatatacagantatataattcaaagcggnttctcctncacacccctaggctcttgtggctgtgggngncacccacatatcgctgaa

SEQ ID NO: 3020 - DNA, 134 bp, Homo sapiens
  misc_feature (1)...(134): n = A,T,C or G
cctcggccctttctcccatggagnnccccaaangngaggntctttgcnnggggggncttgaaccatcccccaccacaggaaacccaagtnntcttncctcaccccctgtaaatccgccccctccctgcctttat

SEQ ID NO: 3021 - DNA, 175 bp, Homo sapiens
aggcatcctgagctacataacagagcttaaagacagcctgggctatctgagccctggtcatagacaagcgagtgttcaacggtctagaatggagacagcctagcctcctgctgtccaacacacctctcttctaggctcattcacagaaataaagtcccttctaggagactgagaa

SEQ ID NO: 3022 - DNA, 146 bp, Homo sapiens
  misc_feature (1)...(146): n = A,T,C or G
gtggctttttaaagctttattnctgncaaanacataaatanttcttgnggaactctcacnnntctgacaggangcatggctgcttccataaanctactgnctcgaanccacnaattcaanctcggtacccggggatcgaaaaaaga

SEQ ID NO: 3023 - DNA, 229 bp, Homo sapiens
  misc_feature (1)...(229): n = A,T,C or G
ggttgtatcgaggtgattataaaaactaaccagtacaaggaggaaagcgggagcgccagtgccctgcatatnacgangtaagttgctgagctctgccatgccctccctgccacaatgacctcagacaccagaagtccaaacaaacctttcttcctttaagttgttcctgtcggatgtttggtcacagcaataataaaagtacaatgcttatatttgaaagaccaaaaaa

SEQ ID NO: 3024 - DNA, 155 bp, Homo sapiens
  misc_feature (1)...(155): n = A,T,C or G
taccactattcttgattcttgaatgactgtctgcnaccagnattcanttctntgaagttttactnttcnntatantggngaaanagctgaaaaccnacnattactananaattctgctgggggggtaccaancctctaaacttatgtttgctaaa

SEQ ID NO: 3025 - DNA, 194 bp, Homo sapiens
  misc_feature (1)...(194): n = A,T,C or G
ttgtgttggggacccagcctatttangaaagacgacggtgcataaagaagagctgaggacgtatcctcacgctggnaangncacgtgcctgncataccggcaaattcnttgaaancaaagaaggganagtccagtgcatctggccganggaggatttaacttgaacatgactttatgtgaagtctcaaaggagc

SEQ ID NO: 3026 - DNA, 258 bp, Homo sapiens
  misc_feature (1)...(258): n = A,T,C or G
ctacacaaggtaccatatgtganaaatgaaaccttggcntacaanngtctgctgatnccttgattctggacttttcagcctttaaaacggtgttctgcttgtatatatncctgttgcaccttgtacatncagtgtgcccttgaagaccagaanaggccnttnggatccccttggaagctatagaaagttttngagnnggggggnngncccacttggnancttgaatcaagctnctntaggaaaacccaaccagaaaca

SEQ ID NO: 3027 - DNA, 223 bp, Homo sapiens
  misc_feature (1)...(223): n = A,T,C or G
gcatcccgaggaaggcgttcanaggcgtcacattcngtgaanaacctgaactgnggtggnggccacaggctatggacctgttctcttgctgactgtaccgactctgaggctggaacnggagangaanctgaggtaaatgagcatcantgangtggntggacattcactcattggacatntaaaaggggaagatagactntttttttngcgcgggcaacaccca

SEQ ID NO: 3028 - DNA, 220 bp, Homo sapiens
  misc_feature (1)...(220): n = A,T,C or G
gaggccatacttacttcttgngagacannaanataccctnncctgnngcntgggnngacacctacatgngcactcccatacatgaaaaaaacaagctcntaaccnantaantaaataatctctaatacaatctaaccaaaggaatncaacatggttaactaactacaaactgcggnccngcccccntggccggggataactttttttaaggggggggggc

SEQ ID NO: 3029 - DNA, 389 bp, Homo sapiens
  misc_feature (1)...(389): n = A,T,C or G
aactgaggatgcaaagctgaaaagaaacaaagaatatcctctcgttcatgatcttacactccagtgacagacgacacacctgtgggatgacagaattctttctgcagatgagagaggacaatgagcaagtggaaacacaggaagacgcaaacaaggtctgcagataattgaacaaggaggagggatgcctctggcagtcctagaaaggagatgatgcacgccgcctcccaactctgcactcagtggnttacagggtagcttgaacccagtgatgaggggactatttacngccactgagattagcaaatgntacataccccattttccttattgnattactggctgtatattaaatttaaaagcatggcatgncactgggaatagcataa

SEQ ID NO: 3030 - DNA, 264 bp, Homo sapiens
  misc_feature (1)...(264): n = A,T,C or G
tagatagtacacctaaatactccgcccttccccaggggcctgtntnaacacaagctgggangangggggacgnactaatgactgatgagaaaggcanngaatcactgatcttgnaccaaanagatccttggaaagctagnncttntgcctncaggttcctggncccatagtganttccagtccctgacttgcttttgntgatgaacancnantntttttntcagggggggggagtaaaaccctnttcctccctaaaaaaaaaaa

SEQ ID NO: 3031 - DNA, 227 bp, Homo sapiens
  misc_feature (1)...(227): n = A,T,C or G
aactgaggtctcctaattnacaagnnacaattctggcaacttgaaaggcatccgactcgcgccgcagggtgtgcgcgccgnctgccgggcgccagcggaactgcgcccaggggtgtgaagtcatgaatcacgaagtgtatcacgaagttaaagtacaaggaacggacactgcatgaccacatcattttcagattgtattgacacttttggatcctgaaaaaaaaaaa

SEQ ID NO: 3032 - DNA, 181 bp, Homo sapiens
  misc_feature (1)...(181): n = A,T,C or G
actgagatggtggactgtttgggcaggatcaagtangggtcacattgttngaaaagganaantactattaagtgtgctttaaggnttcanangccttnnttntcctatttatctntctntgnctcatgcctntgggtcctctactgccccagcaccttncctgcttgccttgcttgaacca

SEQ ID NO: 3033 - DNA, 105 bp, Homo sapiens
  misc_feature (1)...(105): n = A,T,C or G
ctggcacggcactgttganagtacccgaggcttgancntgttagatanncccgnagtntngctgacnaacangcaccaggagaccgacggtatagcaaaaaagaa

SEQ ID NO: 3034 - DNA, 105 bp, Homo sapiens
  misc_feature (1)...(105): n = A,T,C or G
tgcttacctgatggcctttacagtcnactgacctgaaagcaagtctgcagagtttagttcagcttctctgtttcaggttcataaagggccctgtcccctgtcccc

SEQ ID NO: 3035 - DNA, 104 bp, Homo sapiens
  misc_feature (1)...(104): n = A,T,C or G
ttgggcctgaagtaagagntctggggcagcaggccataancacttcttntgntnntttttttttttntacaggaagnatgggnggctccatataaaagaaaaaa

SEQ ID NO: 3036 - DNA, 167 bp, Homo sapiens
  misc_feature (1)...(167): n = A,T,C or G
agtcttcctacctaggnaaagttttgnctgccacatctgtgcacatctgcagcttcctgcaagaagctacctgctgagcagccgagctngncttcctgaagagaaagtggnancctggcacagtggggttttntnnttcccngggggctttaaaagatcagacgtta

SEQ ID NO: 3037 - DNA, 239 bp, Homo sapiens
  misc_feature (1)...(239): n = A,T,C or G
gactgaggatcaatgtgactctagaaacaaatggctgaangaatatccatatgaagaggaaaaccataaaggctggctactcaccgngtntgcaccagaagnggcactatnctctngagtgggacactgtgcatncccaanancntgtantctgactgaattanacagcagnnanatcagtggtagcaggtcaccagtatgcaancntcanctgttctttctagaccctttaaacctac

SEQ ID NO: 3038 - DNA, 216 bp, Homo sapiens
  misc_feature (1)...(216): n = A,T,C or G
tcttataattgtaggcaggacccactcctagctgggtatcccagactgtatgaaagtgagctgagccgaagnctgcattcatccatctctgcttcctcattgtcagcgtgctgtgagcacctgctccaagcgccgtggccttgatctccccacagtgacgggtcggactttgaactgtgagctgaaataaactctttcccccttacaaaaaaaaaa

SEQ ID NO: 3039 - DNA, 175 bp, Homo sapiens
  misc_feature (1)...(175): n = A,T,C or G
tttttttttttcctcngtntttaacaaaacaagctacaggaactgaagcaaaggaccttgaaaaccatcacaatnactgcgttnnnggcanggnnncaaatncaaacatagcancaatgantgaagacgctcgctctaccatttcaacctcagcactagcacacacgatttccct

SEQ ID NO: 3040 - DNA, 186 bp, Homo sapiens
  misc_feature (1)...(186): n = A,T,C or G
tctggacccacagcaatgaggcagcacagtgcctgtactgaacctccttcagcacaaggccagacatccttcccctagcccctgcctgccctgcctccagatgngaacacgccacagctnggagaacctggcctgacaagcctgncactgaaacacaaagctgaactggagggagggggctggcca

SEQ ID NO: 3041 - DNA, 531 bp, Homo sapiens
  misc_feature (1)...(531): n = A,T,C or G
atctgagatgacctgtgtattggtgagacggcgtgtcaaagccacctacagtcttctattgtgcttaagctgtggatttagacctggcttttcaacgttgggtgcactcatgtttggtgtgttaatccgtggcttgtcgctggtgtgcaagccgtgttgttgccacagactctctgtcagctcgcactacgctctggagccccacattacccatcacaggtctatgtcatgtccggctgggggncttcctcttctccactgctgcctgacccttcggatctcagggacaaggttcgaaactctagccaattaaaacaaatacagcctaaccgtgcacaggaatcgtcagctgcacagtgccagcactctgaaggctcgccatgtggcaaatgtcaccatatctgtctgtctctcggtaatggaacaacaaaggatgctctgactgaaagcctgagtgggctgggtagagctcanctgacctagtgctagcttaacacatgggatgctcctgtacttcctaacaaggcatgg

SEQ ID NO: 3042 - DNA, 157 bp, Homo sapiens
  misc_feature (1)...(157): n = A,T,C or G
aagatgggaggtttttttactcacaacaggaaacacaacttaaacagccagnacccgttagttttgggaggatgaaaaacccccgagggacactggggaaggctttgccnttttgggccccaaggaacccaaggatttacntagggcttggcgaaaa

SEQ ID NO: 3043 - DNA, 228 bp, Homo sapiens
  misc_feature (1)...(228): n = A,T,C or G
gactgaggtgtctgcaaacacccaggagnngaaggtagacctagaacagcacctggcccggctcagcgagatcattgctgcccggggtgactacatccagaccctgaagtttatgcaacagatggcaggcaatgtcgtcagccagctctcggggctgcccgtgtggagggaggtcaccacgcagctgaccaagctgtcccaccagactgcctatgtggaatactacag

SEQ ID NO: 3044 - DNA, 203 bp, Homo sapiens
  misc_feature (1)...(203): n = A,T,C or G
tattgttccccttttcanggtagnaggagggttgccaaattgttccaaacccgggcccttaattaaccaatccccagggggggggngccaccttnggccgggaccggtttttcaaccaggganggggaaacaaccttgggcccgggggggccccccaaacccccaccaaagggaacgggacntnccaaatttaggggaggggg

SEQ ID NO: 3045 - DNA, 238 bp, Homo sapiens
cagcctgtgcggtctgtgaacagttggagagacttgttacgtttcagtgggcatgggtgaagatgcctccgccttccatcctcaccagctgagattctcccttgcctgctatttatatgaaactcctgggaaaatggctatagatgtggacttagtgtcttgacctcatttggcaggaacaaattctgaagaattactaattgatgaaaattatcaatggctaccatgaaaaaaaaaa

SEQ ID NO: 3046 - DNA, 317 bp, Homo sapiens
  misc_feature (1)...(317): n = A,T,C or G
gactgagcttcttggtattcctcttagagtcgcatgccagataagacgttattgctgaagataccacactctttgcaagatagagagaaaactggctggaaccgagtgggaaacttctttcctgttgtctgactttcatagctcctcaaagtgctatgtagacagatggagaagaaaggcaacgtggatttaacccagctttgaaccctacaactacagtagcaaacttctgccaggcaaactgaaaagaagtaagaaaaattaaattagtaaaggaaaatgacatgttgctcactgnatagggcattatccccttg

SEQ ID NO: 3047 - DNA, 249 bp, Homo sapiens
  misc_feature (1)...(249): n = A,T,C or G
ggtggacatgaactgntgaagaaacttctcancacaccctgaagaaacagcctgggaaaatggagatgcttctacactcccccccngcccccccaagtggatggcanagntntgctgcccaggatccctganttccaggtgcctgcttgctgtccannatgggggcccatgccactntatgttgctgctgtaaacgtgcagtgacaatacagaccctctggctcctgntgctaccttgaaaaaaaaaaa

SEQ ID NO: 3048 - DNA, 119 bp, Homo sapiens
  misc_feature (1)...(119): n = A,T,C or G
gattttgctgttagccttgacttggtctggaacttgcctcaaattctcaaagatctgcctacctgngcctccccagtcctggaaataaagncctatctaaccatgcccaaaaaaaaaaa

SEQ ID NO: 3049 - DNA, 358 bp, Homo sapiens
  misc_feature (1)...(358): n = A,T,C or G
caccccctctccaccacccantcaaaagactggggccggggtttaccttattgggagggcaaanaaaggccnagaaaccaangnnaaggaaaaaggtgggnaagggaagggtnaccttangnaaagtaaancaaggggaaaggaagngnaattcntggttggggtcgggnanaaaaaggtttctttnggattcnggcccgaagtttgtnccaaggggcccaagggtgggcaattattcctttctcaaaagnggggaaaggggntttcttccacaatgaanggaccaancccctttgggggaagccccccaaagaanaaattcttggganttggccccctgaaccctttttttggcttg

SEQ ID NO: 3050 - DNA, 101 bp, Homo sapiens
  misc_feature (1)...(101): n = A,T,C or G
gcataggagaaacaccacacccgatccaggccagccagancaagaacaatgagactcctacccttaaataaataggtaaaaaccaaacaagaaataaaaaa

SEQ ID NO: 3051 - DNA, 108 bp, Homo sapiens
tctctgtattttattatactccctcgacttctccctattttctctcatggtgtgcttataaccaggctcttagcctccattaaacagaccttgacaactaaaaaaaaa

SEQ ID NO: 3052 - DNA, 191 bp, Homo sapiens
gactgagttcgtgcaggtaaccctgacttgtggcgcaagacccagtcctggagaacaagaagccacccaaccaaggtaccaagagatgtcactgggtagcaacctgtacacatccttgacacttacaaacctggaagtcactagaagctgtgacaataaagttggcattttccctcactcaaaaaaaaaaa

SEQ ID NO: 3053 - DNA, 152 bp, Homo sapiens
  misc_feature (1)...(152): n = A,T,C or G
gcaggccttgaactgtgngtgtgaagatgaccttgaactcctgatttgtctgctttacactcactgagagcaggaattacaggtcctgcactggattctcttaatggacggtgaccacggacatgtaagccgaataaagtctttcatcccca

SEQ ID NO: 3054 - DNA, 109 bp, Homo sapiens
  misc_feature (1)...(109): n = A,T,C or G
cttctttggtagaccttggcccangaccnaganactactatttcccctactggagancaatgatgnggcccnggggcttcagnnnatgaanccaaccagccacgtgaga

SEQ ID NO: 3055 - DNA, 120 bp, Homo sapiens
gactgaggcttgccattcaagtatgtgacctcatggctccctgctgctgccatgcctgccacttttatgcctctgaaactgtaaggcaaagtaaactctgtcttccttacaaaaaaaaaa

SEQ ID NO: 3056 - DNA, 242 bp, Homo sapiens
  misc_feature (1)...(242): n = A,T,C or G
aggttttttctttcttggccccgcnttttcttggggggggaaaagggnaggggccaaccgcaaatgggattggctnggttttcttggaaagaaggggcctnggggagcccagcaaagggggttggcccagcaaggggccggggattccaaggaattccatttccggaaattanttccttcccaaagggcccaggcccagggggttttgggcctttcctttttcntttttaaaagggggaggg

SEQ ID NO: 3057 - DNA, 120 bp, Homo sapiens
  misc_feature (1)...(120): n = A,T,C or G
cttgttccacgcccccatttgcctaagatggcatatcaaatggttcagtnngctcctgtcctgctgaggaagatgttgaacatgncccanttacacagctgncattggggctgcccccta

SEQ ID NO: 3058 - DNA, 108 bp, Homo sapiens
  misc_feature (1)...(108): n = A,T,C or G
acaggaacgaaaagggcntcattatctcttgngaactggagttaaggacngntgctagntnccatggagcatgctgcnaattgaaactagggccttctgtgagagcag

SEQ ID NO: 3059 - DNA, 126 bp, Homo sapiens
  misc_feature (1)...(126): n = A,T,C or G
ctactgagccttttttttatnctctcccagcaggncagggggnacatnanacaaatatncttcnttacgctncctagtatntctcnactgaacacancactgtaatactatagaatatctacttta

SEQ ID NO: 3060 - DNA, 124 bp, Homo sapiens
gactgagagaagaaaatccaaagtaccaaaatggtcaagacagacttatcgacatttctgatcatctgtaacatcagttccgtgttccatcaattaaaattgtttacaaacttaaaaaaaaaaa

SEQ ID NO: 3061 - DNA, 153 bp, Homo sapiens
gactgagatgggatttttgcatcaatctcctacatccacctcctaagtgctggggttggttacaccagaacacccggtttatgtgggtgcagaagatcaaaccaagagacttagtcacaccaggactgagcttcaacttcatttccccaaagt

SEQ ID NO: 3062 - DNA, 125 bp, Homo sapiens
  misc_feature (1)...(125): n = A,T,C or G
aggacccgactttgtttctattagacncacncggnagagggancaacancaacaacaataacaatncttgcangnngtcctctgacctnctgatgcngtcgtcatgccttcaataaataactaag

SEQ ID NO: 3063 - DNA, 186 bp, Homo sapiens
  misc_feature (1)...(186): n = A,T,C or G
agcggggcgccgcggaggcngaggacnacatccnggtagatgctgatntgngcngagggcacagnnncgagcttgctggnaancgccttccgttctgancnctcacatcctgtcacaggnaagggnctgagcaccggnactgccctccctcgtggccagcagccccatgntctccatcaccctaga

SEQ ID NO: 3064 - DNA, 152 bp, Homo sapiens
  misc_feature (1)...(152): n = A,T,C or G
caagcgccttccgttctngatccntcacntcctgtgcacggcaggggcgtgtgcaggnatactgncctccntctgcccagcagccncatnctntnnatcaccgtngagccccttagganccaacttgaatgtngtgtttttttttgcggggg

SEQ ID NO: 3065 - DNA, 222 bp, Homo sapiens
  misc_feature (1)...(222): n = A,T,C or G
gaacggacctctctganatttcaaagacccanagntcacatcntttgactacaagannatggaggaaaagaaaaaaggcatgaaagaaacaacggatgctganccaaggcgcatagcttncttttccaatggcatcgaccccagcctaggngaattctcttatggccctggaagaatgacagncctccttcccttactcnntttttaaggggggggggcact

SEQ ID NO: 3066 - DNA, 241 bp, Homo sapiens
  misc_feature (1)...(241): n = A,T,C or G
gactgaggccttcatgatgacactcctgctgtgangttcttccctgagcaaaaagtacagcggtacacaggacacctnatatgtctcttgggcagntagacccaaacctgtgtcattcccaatgtccaaacatttaggtaataaactcgggactgaaaatgtggacagagaaacaaccggnaagtcaggctctatgaagacatctgacatcgcattaggggagttaggtggctcaccctac

SEQ ID NO: 3067 - DNA, 208 bp, Homo sapiens
  misc_feature (1)...(208): n = A,T,C or G
tagcctgactagctgcctagagagcacatggnagcntatcttttgttntatgagcnggggngaaacaagagtgctcacattntagccaggcgagggtgtagctcactgaggacctcanagggnnngcctgttaaactnccatatcaattttctttactgatagncatagccttanaaaatgttcaatancctgggcgtggtagccgca

SEQ ID NO: 3068 - DNA, 306 bp, Homo sapiens
  misc_feature (1)...(306): n = A,T,C or G
tttggaggctgaagcaccccaggcaagaagatggngaacagagtctcccgcaggatgannatnggatggccnnctgngggggccancnanangncttggagatctgctactccntcccctcctgctcctggaacccgacacacagcncctagaggccccgttctggctccctgctctccctggagactgagctccttctgaacntagaggccaaagcccntttttnnccgnngagnggaacagaggggcacctttcacacccccgananccnancaaaccttagngccaaccccacccccccccac

SEQ ID NO: 3069 - DNA, 169 bp, Homo sapiens
  misc_feature (1)...(169): n = A,T,C or G
tgagaagagggcatcagatactacaacctggccatcagcccccccccccntgcctgctttntntccggggaccccacttttcnggnnccnccnnngcacagaatctcaatgaattatgcctgngagctgnccccaanaaaccngcctttatatactttaaaaaaaaaaa

SEQ ID NO: 3070 - DNA, 344 bp, Homo sapiens
gactgaggctgtcgcttgttcctacggctgcatggttgagttcccagctgattctcttgcctccacctcttcaggagcactgggattacagactccctgggttctgaggattgaactcttatcatcagacttgagaggaaagtgcttttatctgctgagccatctccctggctcctccagtctttagaaatgtgaaaaatgaatttctatctgacttcctatctattctttggtcatttcattcatgaatacaatgtgtttgcatcacatccacccatccttcccttctttcaacttctaaacccttctacttcctcaataaacatctccccaaacaaaaaaaa

SEQ ID NO: 3071 - DNA, 231 bp, Homo sapiens
  misc_feature (1)...(231): n = A,T,C or G
actgagataagaatgaacactcagctctttctccagngcccggactgcctgcctgcctgcctacctgctgctgccgncgacatgantcntgntagnctcaaagnctntagaacnatcacatgcccatattaagacgctttctttnataaagngcgncntngntanagtttggcntatcacagcactagaaaannaacctaagacagaagttgggcacccagaaaaaaaaaa

SEQ ID NO: 3072 - DNA, 108 bp, Homo sapiens
  misc_feature (1)...(108): n = A,T,C or G
cctgccttagctcccccngggcctngcngtccactgcctatggaggccacctcnnagnanntctctccccangcatgctctttctccacaactttgcttcctcaagcc

SEQ ID NO: 3073 - DNA, 103 bp, Homo sapiens
gactgagactcctccttgatttggcaagtctactctcaagtatttatttattcaagaaaaatgaagacattcatccacaaaaaaaattttgaaaaaacaaaaa

SEQ ID NO: 3074 - DNA, 342 bp, Homo sapiens
  misc_feature (1)...(342): n = A,T,C or G
gactgagttggctggncaagatattcctgcatattagttcagcaacccttccccacttgccaggcatcctatcgtctgtgcacactctgcacgaccagctgccagctgctgccttcacagtgcaaacactccagatacagagagctcctcgtgaagaggaaaatgccaagtgttccacatctggcctacgcttggggattggagagatcagcacagtagcaagtctttggctcactcacagctctggtttcttaattatagcaactctagatggatacctctcatggatgctccccacacttgttggncaggctgagcttgaattaaatagaaagagtatta

SEQ ID NO: 3075 - DNA, 103 bp, Homo sapiens
  misc_feature (1)...(103): n = A,T,C or G
aaacatcatttataataatgtccaacactggnaatgnactanagaggaaagtcgaacctttgtcanaagacacacatgagatggtagatcgagaaaaaaaaaa

SEQ ID NO: 3076 - DNA, 258 bp, Homo sapiens
  misc_feature (1)...(258): n = A,T,C or G
gatccctcacattctgtcacggaagggnctgtgcagggtactgcccttnntctgccnagnagncccatctntncatcaccctngagccccntnaaggtcccaacntgaatgtctagnnttttcccttgctgnaggacacttcttctttnctgggggcaanccaggaaactctcaaacagaagngggaggactggnanggcaatnatcccnnaaagctgtccaaggcctggncactanggcattgtaggggttaagacc

SEQ ID NO: 3077 - DNA, 519 bp, Homo sapiens
tgagactggccttattgttgcgtgctaccatggctttgtggataccgtggtggccttagcagagtgtccccacgttgacgtcaactggcaggacagcgaagggaacacagccctgatcactgctgcgcaggcagggcacgtcaccatcaccaactacttgctgaattatttccctggtctggacctagaaaggaggaacatatttggattcacggccctcatgaaagcggccatgcagggcagaacggaatgtgtgcgagcccttatgctggcaggggcagatgttcaagcaagggatccccgtcgtgggctgtcaccacaggagtgggctgcgtacacaggccgagcagaggctgttcgcgtcattcagaggctgatggagcgaccctgtccagagcagtttggggacaagtacaagctggaattgccacttcccgctgaggcggttttgaagaagtcaagttccaaaaactgcttgcagagattcaccgcgttcctgcggtccacttttgacctctc

SEQ ID NO: 3078 - DNA, 138 bp, Homo sapiens
  misc_feature (1)...(138): n = A,T,C or G
gactgagggtatccattganacctgtanacaactgcttgtggtncagttgattcannaggacacgcttcctttanagatggcgggggaactttcacntgtnanaacactgtcacgccttaacgttcagttactgcgca

SEQ ID NO: 3079 - DNA, 273 bp, Homo sapiens
  misc_feature (1)...(273): n = A,T,C or G
ccattacttctagaccgaatcaccaatgagattctnagcnctgtggcgagcangatgagagccacaattgtagctgctcanactgtatgatanngcggactaanacacatggtgacttttcaaaagcngntttnntgccnagaganggagctcagttganagagtccttgtttagcgcgcaagagaccctgcgttcgntnctcatcacaggtaaaaactgggcnaggtaaccccagcacttgggaggagggantacgagaatcagaaattcag

SEQ ID NO: 3080 - DNA, 158 bp, Homo sapiens
  misc_feature (1)...(158): n = A,T,C or G
aagccctgctctgctgccngctagctganangaaggccagagatantancgtctcngaancnaaaccagncnnctgctctgcttctatgtngatgaaggacacagantntaactctctgaaancaaaccaataaactttttcttctataaaaaaaaaa

SEQ ID NO: 3081 - DNA, 222 bp, Homo sapiens
  misc_feature (1)...(222): n = A,T,C or G
tgctgcgtacttagggagtacangacctgctaatggaaagctgaggagaancngccatggacctgctaggctactccttnacagaacccacagnccggagccccatctnttntgaccaccgtctatgangcgcatncctggcgaaggccagttacttggagcacttgtgaagcgacctattagagtgtgcacagttanctgnattnatcagagatgttattt

SEQ ID NO: 3082 - DNA, 154 bp, Homo sapiens
  misc_feature (1)...(154): n = A,T,C or G
ggcccgaggatgaagagctcactgggcaccgggtaagatttctgcantctttacaagaagtgacctgctgggagtnnccccagacactatgcacagttatatcattttattgaataaaaatcatcgatgggttgctgaatgttaaaaaaaaaaa

SEQ ID NO: 3083 - DNA, 104 bp, Homo sapiens
gacctaaagcctgtgtttcacatctatccaactccattcagggagacctagatggcagagaacacgtcaggaataaattcatccctcctgtgtaaaaaaaaaaa

SEQ ID NO: 3084 - DNA, 135 bp, Homo sapiens
  misc_feature (1)...(135): n = A,T,C or G
acgactgaggaagaganaaccntgttacntagaaggatggngtgattnatgcancacngtttaangggtgtttcacacctntgtggaatgcangaggcaccatgatttgaaggtncnnctatactcaagggccag

SEQ ID NO: 3085 - DNA, 134 bp, Homo sapiens
  misc_feature (1)...(134): n = A,T,C or G
ggactgagtgtttgcctctngctgtgatgatttggccagactgctttagaagataaggccccttgatcttggacttccagtgtccagaactatgaagcaaacatcttctatagtttaaaacttaaaaaaaaaaa

SEQ ID NO: 3086 - DNA, 163 bp, Homo sapiens
  misc_feature (1)...(163): n = A,T,C or G
acacctcatcttgaggtntagngaatagagagcactctttgcctctctgacgntgctctggtnttttcagaagcancacttggganagtgnaagangtntancctgtaattagggatatgttgtgccactgnatnacaactttggnggaccacctgtaacttt

SEQ ID NO: 3087 - DNA, 312 bp, Homo sapiens
  misc_feature (1)...(312): n = A,T,C or G
gaactgagttcctgcgggaggacaagnntaggactacctatgactgagccgggcatccatccagacaccgtggaacccaacctgacacggtctctgcaacacctagtcagcatgaagggcaggaggaccgtgacgcgcctgggaccccaattggacatctacatccctaaaggtcttgcaggctcactgcccagttcagatgggcgggcactctgagcatagagcaacagcccttctctttctaactcctactctacagacctttgcaaataacctgaataaagggcaggaaggaaaaccagaaaaaaaaaa

SEQ ID NO: 3088 - DNA, 236 bp, Homo sapiens
  misc_feature (1)...(236): n = A,T,C or G
gcccagtgcagagagangatcctntccgngcagntcccctncgaggtgntgatccgngcgccgntctcctngcggatcctcttgacnagantnccntttcttcccgatgangctgcctacttnnttttcgagnatnagcagccagaangagcaaganaatatccagagagatgaagnaaatgacnnttttgttacacggggatggaacctatatcttcctgattctgtctactggg

SEQ ID NO: 3089 - DNA, 116 bp, Homo sapiens
  misc_feature (1)...(116): n = A,T,C or G
agatgatggtctggcanacctgactgaanatggntggggcntgaggccatgnancggctgnnaatgttatcactgctcatataggaaagattncgtntnatcttgaggtgccggat

SEQ ID NO: 3090 - DNA, 232 bp, Homo sapiens
gactgagagcccctgtaaatgagacagcacacagtaggtatctgggccctggcaccatgggaacaggacagaaggaaggagagtctcttgcgaggggctaacggacctcatgtgaattgagaatgcagctgaattgtgttaagtgtggtggaaggaaaatattatgacaaaagggaagatttcagctccgaaggcatccaacgtggcttttttttctttctttctctctgca

SEQ ID NO: 3091 - DNA, 117 bp, Homo sapiens
  misc_feature (1)...(117): n = A,T,C or G
tttttttttttcttcntgcacacagtggcngacatgcacaagaccagacacntnnnataaatanttctanaataaagatgaagaagaagaggncggaggaagaaggaggaagaagaa

SEQ ID NO: 3092 - DNA, 173 bp, Homo sapiens
  misc_feature (1)...(173): n = A,T,C or G
gactgagattgggtgtctccggtagtgcccttgacctgtggtccaaggaagcccttgattctctgcttcttctgcttacctcaagnacagggattagagtagacctacatcaccttcccagcttcattccaggctagggaatgaaccaaaggattctggcctgccaggtcaga

SEQ ID NO: 3093 - DNA, 237 bp, Homo sapiens
  misc_feature (1)...(237): n = A,T,C or G
gcggtccgtccaagagcgggcnccacacgggtaatcagtancagctnctgnttncancaggancgtacngattctgcggnattggcanagaaccataagcggcaggattcangccngaatactacaagaagttctttggtgcatttctctgtgaagtgaagaccaggagaggccacgnnngcattcgcatggtgtcacaatgcaagagtagatctcttgatttttttttagaagggg

SEQ ID NO: 3094 - DNA, 158 bp, Homo sapiens
  misc_feature (1)...(158): n = A,T,C or G
ctgcacatatgtgtgngtgcaccatgtgttnttggngcccatgaaggccaaaagaggacatcacatccctggaaacnggngttattgatggttctgagntgganagtnanctgnnatccttggnantgagctacangtacccttaactgctgagccgt

SEQ ID NO: 3095 - DNA, 139 bp, Homo sapiens
  misc_feature (1)...(139): n = A,T,C or G
ggatcctattacgggatcttgntnctccaccagcanaaagagaagggtaggggactgntgaggnctttgntactgctattggngacggtctggcactactatgtnaaggcaggctttctttttgctttaaaaaaaaaaa

SEQ ID NO: 3096 - DNA, 169 bp, Homo sapiens
  misc_feature (1)...(169): n = A,T,C or G
gcgcacagcgaagaagactgngactgcatattgatttctgcctccccatctgcttcggaagcaggtactgagtacatcagaaacaatagcgttagcgctcacggggtcgccattaaggaaaaataggtttatcttaaaatatccttttatttgttttgttttgttttgg

SEQ ID NO: 3097 - DNA, 254 bp, Homo sapiens
  misc_feature (1)...(254): n = A,T,C or G
ctggaatcccaacacgcccttcgaccaagngtcagcctgcaagggaagctggatttcctgaatgtggtctccaccgatgggcttttgtgtgctctccaggattgtgatgcgatcaacaccgactgcagtgaataaccttgtataaatgtccttctacacattaagtgccaattcttcaatatgccaggttcccagaagaggagttactntttcagaggangcatatatttatttataattttcaaaaaaaaaaa

SEQ ID NO: 3098 - DNA, 114 bp, Homo sapiens
  misc_feature (1)...(114): n = A,T,C or G
gactgaggttgtgaagtggagccagctctggagtaagacacctgaccacacagtgctctaagcctcttctgacatctctacgtncagcggttgtctgctgagcatcaggcatgt

SEQ ID NO: 3099 - DNA, 448 bp, Homo sapiens
  misc_feature (1)...(448): n = A,T,C or G
ctgtgggatcccaaccaanggctacattgactgacttctcaggcttgccttggtggaaacctctgnatcctgcgattgttgcattctgcacacctacnaaggcagcatcatgcanacaacgccaaggtctgccccatgctctactgcagctggtttcctttgaccacggtagcagcancctccaaatacgctggatacctgcgcaaggcgaagggaatccagggaaaatggcttcctagctgagaagtcnanngtttngacganngaaggntatggangnagccngtactatgaangacaanncgtatccatatganggctannctncttactgacngatnganngccnaatacantncntgtntgntcaaagccagcactggctatttcctatnagnatgcattancantaanatattataaggaaatcaacatgctcattgcccta

SEQ ID NO: 3100 - DNA, 285 bp, Homo sapiens
  misc_feature (1)...(285): n = A,T,C or G
aggggggttgcttccncntaaatttttncaccaaaggaaaaaccaaattttcttgggccaacttttgggaaaagggccatttcccggnaactttccgccggcccccgccnaangggngttggttgggccggccngcccccggncctttgnccnggggggccggcccaagccgggaaaacttggcgccccaangggggtggnggnaagtccattgaaatcaccgaaagtngtnttcaccgaaagtttaaaggtnccaagggnaacgggaccccccccttggacccc

SEQ ID NO: 3101 - DNA, 104 bp, Homo sapiens
  misc_feature (1)...(104): n = A,T,C or G
catatttcagcacataanaggtccaaanttccnngccncgcantcacatgggtgngtcncacccatcctcttacangatcatgactgnctgttctggagtgact

SEQ ID NO: 3102 - DNA, 376 bp, Homo sapiens
  misc_feature (1)...(376): n = A,T,C or G
gactgagaggctctgttnnagccttgctgtatagtacaagagagcnccttagttncaaggatganaagatggcttnctgaagaggancaagtnctaccaatcacanactatganaggtgccanagggttgacttccaacaggaacttcanagactatttcagcaacagaccctggattgtaccatactcanactatttaaaggaattactttcactttccnatgtaatatggttcttaactgacttanaaaaggaagactgcttnatancananggtaaatgaagagagatgagtcttggtaagaatgggaatagtaagaaacanaatccctttgagagagattataggcaccatcttttattatgatagaaccca

SEQ ID NO: 3103 - DNA, 463 bp, Homo sapiens
  misc_feature (1)...(463): n = A,T,C or G
tattggaagagccaagacanngtncataaataacaaagaagancctagccgtgtggnctggtagcncntngcttccggagatttatgacgagggataggaggagcacttgccctgagtgtatgaggcatcagggtcaatcctgcatctctctgtgtagtcctgggtttgcttacaggacaggctggaacacgaggcaggaatgggacgtctggtaaaaacaagcagcagagcaggagttggtcacagccaaggagatgcactgctgctcaggaccccgatggaggagcagccatggtgggaaaggcccagaacaagatggcacatgtttccagagccctggaagtgtctgcagccagcccaggtcccctcactcttggaagaagggtcacaaggcaactggatcccctgcccgtggcaaagcagagctaaactagataaatgtttcctccttaaaaaaaaaaa

SEQ ID NO: 3104 - DNA, 104 bp, Homo sapiens
  misc_feature (1)...(104): n = A,T,C or G
gactgagcttgtacaatgacaggcccgggcagcccagataagctctcgcccttgatctcctctttgccatcccnggtgccccctctaatttttaaaaaaaaaaa

SEQ ID NO: 3105 - DNA, 301 bp, Homo sapiens
gactgaggaaggacagcagtgtcccagcatgcaaatggaagccagaggacaactttctggagtcccttttctttcacctttatgtggggcctaggatctatcccaatttgggtggcggagtcttactcttacctgctgaaccatctcgctatccctagatattacgatatgtaaattgtgacccagtaggtttggacggggtctgacatctacatttctcctgggattttctgttgtgacttggaggcatgctaaaaccacaatatcttttcaaataaatatgctctcatgaaaaaaaaaa

SEQ ID NO: 3106 - DNA, 211 bp, Homo sapiens
  misc_feature (1)...(211): n = A,T,C or G
tgttaaaagggaattctttacccnntgggttttnggtgcccagggggganagganaanattttaactngcttaacttttttnaccannggccctttnccanaaaaccaggggaatttgtcangacnccgggcttgggggnaatgganaaaaaagccccggggattccttttggaaggngggccccttggaaagnaaccccaaccccttttt

SEQ ID NO: 3107 - DNA, 319 bp, Homo sapiens
  misc_feature (1)...(319): n = A,T,C or G
gactgaggttcctgtcagttacctgctgtgccgtaggatcctgtggagtgtatcgngatgcctgagtatcagacaacggcagccagnntaccnanattnntgccgcntntaccttgngnncgnncnttnnagtgagnccattnactggctaaantncacnagtaagagggcacggggtgccgttccngcgncnnttagagagctaccatgtgnttgctgccatttgaactccgaaccttnttaanagcagaccatgctcttatctactgagccattanctccagccccatgctttgtattcttatagaaaaatcaatgc

SEQ ID NO: 3108 - DNA, 270 bp, Homo sapiens
agactagcccggagctgtggtacctaccatggctgtgggtcgccttgacaaccagcataagccatcggagaggatgaaggaccagccgctgagcaggagcaaaagcctatgcttgataactccgggacagcgacagacccaagaccattggattgtctcttctgaaggctttgtgctctgacagatagtgcctttccagcaagcaaagactggggcagggcaccatgtttaaactccaaaataaagcctatcttaggtgaaaaaaaaaaa

SEQ ID NO: 3109 - DNA, 161 bp, Homo sapiens
  misc_feature (1)...(161): n = A,T,C or G
acagagctgtgagaggggttgnccacgagccaggcngagcaccaggaaactgaccttcctacttntnttnccgttnaagcnttgaangncatgaggcttatacaacattnccatacacgtgcaaatccagntcgtactttcaaaagataaaatttctggag

SEQ ID NO: 3110 - DNA, 111 bp, Homo sapiens
  misc_feature (1)...(111): n = A,T,C or G
cctcgctgccaagtaccaactttgtatnggnaaggacccnganggagagagtcaggattgacatgtatcgcacatggcacccnaggacctaatgatgatagatttgccgcg

SEQ ID NO: 3111 - DNA, 182 bp, Homo sapiens
  misc_feature (1)...(182): n = A,T,C or G
actggcgacccagatgtnggagaggatggctgnccagtagaannccacnggatnctcctttctgtaccttctcaaccngnggactcacagcttgtgtgcacaccatacccagnattttgcatngggngctggggttnganctttttttttttcatgggtgcanaagagagctctttactaga

SEQ ID NO: 3112 - DNA, 251 bp, Homo sapiens
  misc_feature (1)...(251): n = A,T,C or G
ccaactttttggcccaaagaagnaagggaaantngggttttccccnaccaattggggntngggttttaacctttttggggaccnatttttcctaaatttttttnccccccaananttttaacctttcttttaaancncgggggccccctttcccctaaaacctttggggnccaattgnntggtttttgggcccccagcccttcnnnaaggaagatggggncctatttttatttaaaaattcccctggaatc

SEQ ID NO: 3113 - DNA, 124 bp, Homo sapiens
  misc_feature (1)...(124): n = A,T,C or G
atgaatgatgataagttttgagngatcccggnaacatctactggctttcctgatctntggtctnacccttgaaccngccnagcntacccaggncngtgcnctatggncagaggacacgtcctgt

SEQ ID NO: 3114 - DNA, 213 bp, Homo sapiens
  misc_feature (1)...(213): n = A,T,C or G
ttttgtttttcgcttgagtttcntccctggcttcaagttggttttggtcagtgtcaacaaacgagaccatctgggataccaggcaagtgttctactcatgagtatactctcaaccattccttaaccttttaaatacaaagcacacctgtttatttaggcaccatcttgtttatggtatgatcatngacatgtattagttcaagtaaaaaaaaa

SEQ ID NO: 3115 - DNA, 558 bp, Homo sapiens
  misc_feature (1)...(558): n = A,T,C or G
gactgaggtggggtctttcagagatagcgcggcagtgcaagtaccttccctagaacgacccgaaggtgagccgggccggaggccgtccagcttgcgaggcaagccccttccggcggagggcgctccgcggtgtgaaaggaccgggtccgaggcggcgtgacgctggagaaccaggggagcccggatcccccgaatgctgtccagttctttgaggggagatcccgggggatgtcacgatcccctgaccctcacgggactccgagcttaaagactctcactttaactcgctcggcctcccggagacggagccgggccgagcgggtagtgctcccgggatggggtcctcccagcagaggtaacaggagccgctgtctgctccagggacgcggccgcggtgtgtttaagaccctgagaggtggaagccggtgggcgggatcgatgcgaccataatgggagagaatgacaagtcgcctcagcttcaccactcccctaaattgcttcttaggagtggnagntttcttctgataattttggatgtggatcccggttcttagcacg

SEQ ID NO: 3116 - DNA, 110 bp, Homo sapiens
  misc_feature (1)...(110): n = A,T,C or G
atggttctgctgcctatgtgactacttgnccccatacctacaagtacngacngtttgcggctgnangntgnnccagcanggcaggctcctagactggtaccacctgcttt

SEQ ID NO: 3117 - DNA, 107 bp, Homo sapiens
  misc_feature (1)...(107): n = A,T,C or G
gtggagtctttcatgaaggagtgtttctaccagccaatgcnnctnatggnatagttgtaganctantaccaagttttagatggagnaganttagatattgatttaca

SEQ ID NO: 3118 - DNA, 121 bp, Homo sapiens
  misc_feature (1)...(121): n = A,T,C or G
gactgaggtccaggaccncgagcanggaaggagagagttgacgtgcacannctgatctttgacctctanacgtgnaactcagtacttgcaggaggaggtgnggatgagcgcacacacacca

SEQ ID NO: 3119 - DNA, 116 bp, Homo sapiens
  misc_feature (1)...(116): n = A,T,C or G
gactgaggtgggttttgggctgaggtaganccctgggcaggaggccattatttncttcttggtgggaacctcttcaangggtccggaccagggaagccatgggccttgggtttccc

SEQ ID NO: 3120 - DNA, 151 bp, Homo sapiens
  misc_feature (1)...(151): n = A,T,C or G
tgaggcccctcgagagccagctagnggtcagccgcagccttccttcggcgcctgcgcagctgctaactgttcagtgaatactcatggaccggaagagtagatgcctctcaccactggctggnccccgagccgggagtacaggaggaaactg

SEQ ID NO: 3121 - DNA, 111 bp, Homo sapiens
  misc_feature (1)...(111): n = A,T,C or G
taccacaaagctacctcctggggacttaangagcttttatgttcatattnngagacagcatctgaactgggctattcctgggncgtcaccttgactatatctggaataaaa

SEQ ID NO: 3122 - DNA, 272 bp, Homo sapiens
  misc_feature (1)...(272): n = A,T,C or G
aatttctttccacattgtggttagantttggacccttggaaaaagggaatggatcattcttngcattntaaccaaaagggacccgggcntcggggggnccccctnttccntttttaaaaancttgcaaangccngggaaagncttggaaaaaagcccnccnnatttttttggangnggggncccaactttttgggaaacaaaanaccccttggggaaaaangtttttntttttttngnagattttttttttttggggggaattttttttttt

SEQ ID NO: 3123 - DNA, 149 bp, Homo sapiens
  misc_feature (1)...(149): n = A,T,C or G
tatccttagcttctctgaacagtgcttggcaccaggcacagnacagcatttgntgaagaactgaattctcatcttttngccctcatctanccccttctaacttcccacccctctctccaccttgcggtacagctagcccagataaaaca

SEQ ID NO: 3124 - DNA, 349 bp, Homo sapiens
  misc_feature (1)...(349): n = A,T,C or G
gactgagggatgtgaacctgttttgtanaaattgganggcttgtttgggttcttcagaattgcggcttctgatncactggangtggctgngcccctacccngnanccccctgaagtggctggcattgntgcanatgaggctgttgaacctgatcgtgttctctctggccttggacctgagtgctgcagagagagagagagagggagactctgatggctctgaagatcatggcccttcccatatgaggttctaggcagtattcctganccggtctcttgctcactccccagcccttttgaataccccttttcggtatgaatttgatgatctaatttgactatctctcaaa

SEQ ID NO: 3125 - DNA, 301 bp, Homo sapiens
  misc_feature (1)...(301): n = A,T,C or G
ctgccacttacagggtaagacagaagtacagccagtgagctcacctgaacagcctgcgaagtcatacacagaatangagaaagacatcaaggggctcatggctttgtgggtgctcttggcacagggaagttgcaaggtgagatttccagtggccattgcaagaaatgacatcagttcctgcctccaaacccactgttctgctcaattgcagggttggaggctggaaaactatttctccagtgaacaccatgccctgactttaacacatctgataaatatttatggaaagtttgcaaaccat

SEQ ID NO: 3126 - DNA, 281 bp, Homo sapiens
cgggcttaagcagctattgttgagagctcaggagggaggctgaacaacacattggcggtatttcctgggtgaaggttatcttttcctccaaacaaaggatttaaagtgagttcggaagccagatgtcttgaggatgccacctctcttttgtctgaccctcatggtttctgccacagccctctaatgacccactctaatggcgtgagcgctgcagctttctgaatttgtgacacatctttttttcatgaataatttaaatctctaagtggcaaaaaaaaaaa

SEQ ID NO: 3127 - DNA, 192 bp, Homo sapiens
  misc_feature (1)...(192): n = A,T,C or G
gcatatttttctgggcttacaanatgggctaaggaccactggtcctctaagagccctctagtccttcagcaccagattgggactgcagaggttcccctgcctcgtagactggaagtaaccacctgttttctgcctttcagatgtangantattccaaccttgttgtgtaaactgatttaatcagcaaataca

SEQ ID NO: 3128 - DNA, 324 bp, Homo sapiens
  misc_feature (1)...(324): n = A,T,C or G
gttccggggaccaaagtctgttgtncagaggggcggagcagaggcnaggcgagagcctttatctatgcagagctnacagctnaccattacgcanagccgaggcgctgatggagccagaaggaccttngttntgttctcccgaccagctncttcttgcttgctatccagacacctnaggtgaggctgggnntcaagacagagtganangaggncctttctttnagttnncagagcatctacanntgntgngcctgtgngccaagttnccccagnggtntgaganggccttgcttgngcagtgangctggactgccatcttgattt

SEQ ID NO: 3129 - DNA, 139 bp, Homo sapiens
gactgagaatgttatgaacagaagcagtacaaaaatggcctcaagttttgcaagatgattctttctaacccgaagtttgctgaacatggagagactttggctatgaaaggattaatactgaactgtttaaaaaaaaaaa

SEQ ID NO: 3130 - DNA, 119 bp, Homo sapiens
  misc_feature (1)...(119): n = A,T,C or G
tacaacattggctaaggaccnctggtcctctaagagcccatctagtccttcagcaccactattgggactgcacgaggttccccgtgcctcntagacngntaataaccaccttgtcttct

SEQ ID NO: 3131 - DNA, 101 bp, Homo sapiens
  misc_feature (1)...(101): n = A,T,C or G
tttttttttttttttctcngcactcttcaccccccctcgncggntggcccctaaaagcgcccacggccgcgcgccccccttttttttgggggggggggaaa

SEQ ID NO: 3132 - DNA, 371 bp, Homo sapiens
  misc_feature (1)...(371): n = A,T,C or G
gtagcaggaaagccctgacctgcgggagttataaatcnnccagctggcagaanancnagcttgtaattcacctcaaggtgatagtgggctcagaggcagggggtggtgcagcagctcactccctacctgtcagcagcagctacaagggaagggcctcgcctctgcctccccacagctatggactgacacgtggcacatgctgaggggcnntctccagagctgcggagagtgtgggtttcaccatgttggcaccaggcggtggcccagagcagaggagcaagcttgtcctgcaatggaggcaggtctcctggatcacctgctggattgccctgtgtgctgtggaggtgatccctgcctgccccttctcctta

SEQ ID NO: 3133 - DNA, 329 bp, Homo sapiens
  misc_feature (1)...(329): n = A,T,C or G
aaacacatctggtccatgacgtgaggcttgtcaagaagagacaactcctcagagccccggnctggcctgggcggaaatcagagagctgaccccattgcctgctgcacttctcacccgttctgtccctcccttccccaccagagatctgaggacaccacttgagcacttctctggggaggaagtggactcctggcccctccacgttctcatggggatgcagggtgggaggaatacccagcaaccccgggcagttgtgtacttaggagacctggcccctaacagttcccagaacattcttaagagtccttatgcctccggaaaaaaaaaaa

SEQ ID NO: 3134 - DNA, 426 bp, Homo sapiens
  misc_feature (1)...(426): n = A,T,C or G
gactgagatgcggaatggaatncagggatttttctacccatggagttgtgagggagatgtgtgntaccgagagagctgcgggngtcangcancaattgataaccccancctctgcctacgcctgcggtgctgntaccgncacggtgtgtgctatcatcagcggccagatgaaaatatncggaggaagcatatgtggncactgngctggacctgtggcagcctactcttcctgatcaccagtatctgtctcttctggtgggccaggcgccaagacatgctgcacctaccaaggtttctacatcggaaatgtagtaaactgtcaaagacagtctcctcactgtctaaggaccgacgatcggccaacaagtcaactaccgttctccaatccccaggaggcgaagtanaaactgcagctgcagtttccgg

SEQ ID NO: 3135 - DNA, 121 bp, Homo sapiens
  misc_feature (1)...(121): n = A,T,C or G
ttggaaggaccaccatgaggactacttttttggaggagcgggnaagcctctctgacanatatcatnatgctgatgttatggtacctcacanccatntcattttgaggaagcccagcgcccc

SEQ ID NO: 3136 - DNA, 123 bp, Homo sapiens
  misc_feature (1)...(123): n = A,T,C or G
tgctccaaaataaactatctcctatctctttnganaaaganaactaactntaacnggctnnctttngatgaccacatagtgagttgaggngtgagcccccctncttagctaaacagacctatg

SEQ ID NO: 3137 - DNA, 480 bp, Homo sapiens
  misc_feature (1)...(480): n = A,T,C or G
ccactgagtggagaagcttnnctcccaacacagnnnggccgggccagcgntggggcccagntaaaggatgctggacacaangtgccctcggcagctgccacccctcactctcgaacttgcctagaaccctgagcanagacatagncggatcactatccgnnaccgancggntctgtgattntgtgacagcgngacatttggantttgcctcacaaangannccannaagtctcaaagcanatgangatttaaatgtggctgtggacnatcctngatccttgaaacccnncacaattcctttaggaaggaatctancatgagagcccacagcttaaagggagtcctctaagcaagaattgctctttgagtcctacccagctggctcagagcccagcttgggaaggggtctttggacaaacctggcacccaggattggacccagcagtctgtgcttaattgggttttactccctggcaccag

SEQ ID NO: 3138 - DNA, 317 bp, Homo sapiens
  misc_feature (1)...(317): n = A,T,C or G
aaaggaaaaggggagggggggccggggggccttcccttggggccaaaggggccgttttttggcnttcccttggangccaagnangttccctttgncaaaaaggattgggaannaaaaggggaagggaaaaagaanaaccaaccccccggggnaggcttggnttgcttggccccaactttggccaagggggcaagtgggtttttccccancggggccttttaaccttttgccccaaaaaggggaatgaatggggngttttttttttttnaaggagggtnnatttcnaaaaatttccccttttggggcccccccatttt

SEQ ID NO: 3139 - DNA, 243 bp, Homo sapiens
  misc_feature (1)...(243): n = A,T,C or G
gactgaggatgtagtactctcagctgtgcctatacgcatgcctgcctgnatgacgtncatgtncctgccttgaggataatgggctgaacctccangactgncatatacactactcgcctanaatgtgagngacttcatagcnaggtgacnttgngnancggaagttnntatacagnaagagaaccctaaactgacgacaccaaaaaaaancntccaaagaaagcnccctaacttcagggggtg

SEQ ID NO: 3140 - DNA, 270 bp, Homo sapiens
  misc_feature (1)...(270): n = A,T,C or G
gactgagacaagactgaagactcccaggntttccgaagcttctgtgtgagatgaggcatttacgtgacttcactcaaggtgaggacttagccgtcggggctgcacaccccgatacaaatccagctgtgtgtttaagggaagcagctgtttccanatgagaaggaaaactcacttatatttctttttgaactttactcctttttaaatgttttagttgttgctggcatatattctttgtacataatcatgggctttaggggcaacatttac

SEQ ID NO: 3141 - DNA, 355 bp, Homo sapiens
  misc_feature (1)...(355): n = A,T,C or G
ccaggattctaaaagtgnacttgnttnctgacaatatggatccntngccncctngaancaaggatngcctggagtcctttctctaatggagaggccccnaanngnggnnctttnctagggagncttganccatcccncnccacagaaacccaagttgncttccctnannccctgtnaatctgccccctnctgcctttatttatcacccatatctaatcaganaagcangnccnggccttctttcttttatcctntcccctcctacaaccactcatagtggggaggggaaaaaaaacccacccctgatcccanttnacggggataactgntatccatctcatactctatttccttt

SEQ ID NO: 3142 - DNA, 103 bp, Homo sapiens
gactgagatgagtgctgtgtccaggatgatcatgaattcaagctctggagcttgagatgaactggtccgacttctagaagagaaggttccccccccccccccc

SEQ ID NO: 3143 - DNA, 158 bp, Homo sapiens
  misc_feature (1)...(158): n = A,T,C or G
atgaaggagtatgagccacaggacccccggcctcagactcagaaactatgtgaggaggnnntaagtgaggacngccnganagaccnnggagtgntgangnagacactgncaaccaatcgggaagtgccattgnagaggagaagctttctgggtgccag

SEQ ID NO: 3144 - DNA, 426 bp, Homo sapiens
  misc_feature (1)...(426): n = A,T,C or G
ctgaagactgagtgcgtctgtctgcgtgnnattacacacgantgctgnctcagcaggcatcagatcccctgtgagctccagttacagacagcgccagnctgacttggatactgggcaccanactcaggtnctctggangagcancaaatgctctccgctgtctgagctgcggagctgtctttccagcactctctggggtttccgttggaganaggcctccagntgaaaccagagctcccagattatggatntactgactggaccagggagcctnagagntcccccnttcttcctcaatgtaagggattacaggggtgcacccccacacntggntattttgacctgncagntggacccgcnncagaggggnnnnnanccctgaaccctggtcccagattgacntnggaggntactttgaggcaacac

SEQ ID NO: 3145 - DNA, 320 bp, Homo sapiens
  misc_feature (1)...(320): n = A,T,C or G
ctgagactgagacacagccaacaccacagactgtcctctctctccaccctcgctgatacctctgcatctaatggatggagatggttggtctagattcgtgaactgactcagngttnccatctttagactgagacagacctccanntnggctctgagctcttntggggngnnctgcanattctttgacagatccctcgcttgctactagnccaagatgtttcaggctgatttttacacatttcctgncccagacagtcctccactgagataatatttaaatataaatagatcagagcttttacaatctccaaaaaaaaaaa

SEQ ID NO: 3146 - DNA, 127 bp, Homo sapiens
  misc_feature (1)...(127): n = A,T,C or G
gactgaggagcatcattctgatggagccagncatagtgacaggaagcattcagctggacaacaacactgtttaagcacagcaggctggagangagaataaagatctacatcaactcaaaaaaaaaaa

SEQ ID NO: 3147 - DNA, 389 bp, Homo sapiens
  misc_feature (1)...(389): n = A,T,C or G
gactgaagactgagatacaggancagcagctgacatgtgcgggactgaggtgtncagttgaagacaaanccgnggngacagcatgcangttaacnnagagcagtgtctgaccagacccctcagnagctacnagncaatatcagtnccctcttttatagctcctaaatccttgctttatttattgctccctgncattgtaagagtaagaatnnnnggtnntccaaancngagctcangaatntatncaangctacatagctngaatacgactgaatcctaggcattttgttcaacatcccacattctttccactgtcagaactttctccctttctccacagaataaaacttaatggaggtgccttctctggcatgccagcaaaaaaaaaa

SEQ ID NO: 3148 - DNA, 110 bp, Homo sapiens
  misc_feature (1)...(110): n = A,T,C or G
gactgagggtctcatgagcctccagggtgattttgaagttctaaatctcctgctaccaagtgctgggattgcaggcantnacccataaacacanaatattaaaaagaaaa

SEQ ID NO: 3149 - DNA, 175 bp, Homo sapiens
  misc_feature (1)...(175): n = A,T,C or G
tgccttcattcccaggtagccnctaccccagngngctgggagcttgaacatctctgngccatgttttttagcgggccttcaaaacnggatgccctcatnnanncaccgnctcagcagtantatggcttaagcgcnagcacntaggaccctgaggtgtgnctcctgggctaaagcc

SEQ ID NO: 3150 - DNA, 177 bp, Homo sapiens
  misc_feature (1)...(177): n = A,T,C or G
tcaccagctcctgcccagatgtctctganctgtaatttngatnancgnccaggncacttaaggcggagagcggcgccttcatctgcgagtcaacangcctatntttgggaaaacagctctcctggaaaggaggagagnnctctggggggatncctggcgtggaagccagggtatgat

SEQ ID NO: 3151 - DNA, 201 bp, Homo sapiens
  misc_feature (1)...(201): n = A,T,C or G
gggcagaggcccataattacttcttgnggaactctcnanaggtctggacagggaancagcncactnananaaacctgaggnnccanacncgtggcncccttttctactnggaaccnnangattattccggcgggaaatcggggtcccccttccccctttcnttnataaactggggggtcacnaaccaataaaaattttgga

SEQ ID NO: 3152 - DNA, 223 bp, Homo sapiens
actgaggtagaggcgaatgagagagagagagcaagtgatcctgtggtggagcctttgcctccgtggggaagctgcacggaacagaattgaaggcatctcataggtgggctctttcttctttcctaccgcctcttgattccaattacctgaaggaacaaaagcaggcattaaaataaattataaatgatttgttaaaccattaaataaattataaaagaaaaaa

SEQ ID NO: 3153 - DNA, 367 bp, Homo sapiens
gactgaggcttctggttactcccgttcccccctatcccttaattttatttttctgaagaatctgcagttcaagctatcaaggtggagagagcaattacagaaagacgtgttcattgtttcagcagtgcacctatgtgacatgggtttacatattatgctgcaacaaaaacaagtacaggaaaagacttgatgctgcggcttaaatgcggatctgacttagcaacatcacacctaatatgtgtgtggtaaaaagacgtagaaacactattctcatcgaaattgaaggggtttgcatgtcttattgttaatgtaagatgaaaataaaagatgggtttatctctggtattgagattttaagaaaaaaaaa

SEQ ID NO: 3154 - DNA, 178 bp, Homo sapiens
  misc_feature (1)...(178): n = A,T,C or G
attttttccaggggccttggtgggcttttggaaccccaaagaaaaacttgggaaaaactttgggtgggggaaaaggggaataaccaacctttgggggcccattgggaaccccgcccccnttttctttggctttggccggccttttttggccttttggcccangcccccttggttggaa

SEQ ID NO: 3155 - DNA, 197 bp, Homo sapiens
  misc_feature (1)...(197): n = A,T,C or G
tgtgttttttatgctccctcctgcagcgacgnatgctaaagagacantggcgacccctctcttgcctntcaaactactganataaggggcgtcaanaaattacaggnccaggtgtggttggttgcacgcctttaatcccancactcgggaggcacgagacaggccgatttcctganttcgaggacatcctggcctac

SEQ ID NO: 3156 - DNA, 101 bp, Homo sapiens
  misc_feature (1)...(101): n = A,T,C or G
tccttgaggtctgggcctccctagtttggcananannnaaccgacgagccnaagttcaagagagngngcaangaaaaaagnggaccggtgctgactgaagg

SEQ ID NO: 3157 - DNA, 212 bp, Homo sapiens
  misc_feature (1)...(212): n = A,T,C or G
agactagggcctttgttggttatatgtctttcanagattttctttcagcctttgtgantncatcctttgncagggatnttgcagaacaaanatttttagttttgctgaagtctaattnactctancggtgttatatttatggancatancttttgatgccnngagtnagangnattncctaggngccttnccctctttataaactagggaga

SEQ ID NO: 3158 - DNA, 243 bp, Homo sapiens
  misc_feature (1)...(243): n = A,T,C or G
gctggctagttcatgtcctgcaggnactagnacntgcatgnnaccaggngaacggtntccagctntatgcnnnactgntnnagtggngaagacaagtaaaagagcttgttgcttaagcccaacaacctgagttccactgttggtgcctacaggagcatcaactcctcaaagttgccccctccccccccccaccccccgtattttttgggggattaaaggcatgctccaccactaaaaaaaaaa

SEQ ID NO: 3159 - DNA, 130 bp, Homo sapiens
atcacaggcgccccggtctgggtgctggagggaaggtttcctcagactggagcagcagactaatttttgaatctcttccccctcccctgccattcataatataaaagttttctggcttcaaaaaaaaaaa

SEQ ID NO: 3160 - DNA, 119 bp, Homo sapiens
  misc_feature (1)...(119): n = A,T,C or G
gacagccactaggggcaaggaaagagannnggttggacccagnctctnaaggnggncctccgtnncggnagaatagctgnttttgctcacttacctacttaagcatacttgactggttg

SEQ ID NO: 3161 - DNA, 124 bp, Homo sapiens
  misc_feature (1)...(124): n = A,T,C or G
aacacttaacccctcctgggaattcacaaagntagananganaaatcttggnattgatccagaggctcaaattacccgagaagtgacctctncttncaagagggactcatgccagctcctggtt

SEQ ID NO: 3162 - DNA, 337 bp, Homo sapiens
  misc_feature (1)...(337): n = A,T,C or G
tctaccccagttatcataccaagaggaatgcaaggnaaaacagaccatggaagacangcagaanggagaaccgcaaccaaatcnagtcccagtnatcgactganangngatngngganacncatgctgcccntctgaccagtgggagagagcaatatncggnacttgcaaacatntgtgactgcngccatttccnagcctgtnccattancctgtttagcngtntangtgcccctagctgcttctctctggtccaaggtacctgattctagtnaggagagcactgagcacactccttantggttctagtcttgaggtagctatttgacttatttatg

SEQ ID NO: 3163 - DNA, 528 bp, Homo sapiens
  misc_feature (1)...(528): n = A,T,C or G
ctcaaggaagttactgcaggtaacagtagcagctgcaggatcaagacngagtggaggaataggagaccatgttcttactccctggagatggagacttnaagctnactcntntgnnagancgagaatcangcacgcctcnngtgagagctnntgtgnnagacncatgtcantcaggcanaccanttccntcttcacagccaaganccttgaccaagntgtttccatcctccagtggnnncttctttccacccacctgtgaggngntgtgaantcccgatgtgtccagagctcagaccacaaccactcccacnncngtcncagnanacncgnnnaggggagcctcnntggacacaccctantggcatgacacacctgcacagcagtgtcacatnttgangccaacttttctggggtnctgggaggttccaatgactcttctagttctcttgctcagaatacgtgtgaagggacagcanggatgctctntaggggtgctcagacccactatggnccctatgtcttcttgcc

SEQ ID NO: 3164 - DNA, 250 bp, Homo sapiens
  misc_feature (1)...(250): n = A,T,C or G
agggaaaaggaaaagggaggcccttnncgttttactggctttggctggcttccgagnaaaatggggtggaggcttggatggccctttaagccgggaaacaaattccccatttttccaaggaggaaccancancaaacttttaaattagntccatcctttctggttaaanccgccaangggatttnttttttaattcgncctttttantattggaaagccaagaattttnnanggggtttttaacttaaaa

SEQ ID NO: 3165 - DNA, 123 bp, Homo sapiens
  misc_feature (1)...(123): n = A,T,C or G
acttttgtgaatttcgggagnattcagantttgatnttcactggnaccctggnagaaggaccnngacaagaatgaggtgngggtntgataaatacaccanagggatctagttaaccttcaagg

SEQ ID NO: 3166 - DNA, 426 bp, Homo sapiens
  misc_feature (1)...(426): n = A,T,C or G
gactgagactctcccttcgtnatgggagggggaggtgcagactcatggtctcgggatcanaacaactctgagaaaccacagagagccagatgaagaacagcgtggaaggctctgactggagttagaagccgcaacacttagaactgcaggtttgggaacggctgggcagaatccagagctgagatatccctgagcctgcagcctctgccttctctgaagatgggtancctggtctggaggggatgcctatggccctggcanggcttccatgctaggggggctgaagccaaaggctcaagatgggctcagctcagctgtgggcagttgacgaaagagttaacactggtggagggcatacacagaacccagatgtggggagcgttcggacttaatccagacctgattacattttggttttggttttgg

SEQ ID NO: 3167 - DNA, 190 bp, Homo sapiens
  misc_feature (1)...(190): n = A,T,C or G
gactgagatagagagggagcagattccaaagnggtctgcccccctcaagccccacgcaaccagtatcgaccctcatcttccatgtctgctcttgcgtcttgggcagaaaccggagagctagcgccactgctgctcgggtgaaatctgtatgattaaaaagcctgttacatttattacgaaataaaaaaaa

SEQ ID NO: 3168 - DNA, 253 bp, Homo sapiens
  misc_feature (1)...(253): n = A,T,C or G
gagtagggggtgtttngntgactagcangttaagcaagcactcgnggaccagtagggcncattactttcactttgtttggacgcncancttctncnaaagcgtacgtgaacaggganaggcatgggcttggttttcncttaccggaaagnttcccccncaaacncccccaggngtgggttttcncagggancaaccttggaaaaacttaaccattgggctggccttttggntttactttcccaaaaaaaaaaa

SEQ ID NO: 3169 - DNA, 114 bp, Homo sapiens
  misc_feature (1)...(114): n = A,T,C or G
tagtgtttatcttggctcnagtncannttattttngatgagatggcgtttttngctgtnttgagngggntaannttagctcccaattcttgcccctctgcttcttcttcccgcg

SEQ ID NO: 3170 - DNA, 134 bp, Homo sapiens
  misc_feature (1)...(134): n = A,T,C or G
gactgagtagctgagtcatggccatctacacctgctgcagctgatgacagatttcagagcataattagtttgtgagtatgngncnngtggcttgctactanntnatttttnctgctttcccagccctgctgcca

SEQ ID NO: 3171 - DNA, 102 bp, Homo sapiens
  misc_feature (1)...(102): n = A,T,C or G
ttgacttagggagagagagtntntctngtagcngtgcagtgagcttntgaagntnacntagtaaggtntcagggtnatgaaagagcagcgaggcaccggctc

SEQ ID NO: 3172 - DNA, 329 bp, Homo sapiens
  misc_feature (1)...(329): n = A,T,C or G
cccagcaccgaccgcnctcttggaggaaagagggngccttcgtttctgnttgctgcncgggacnngntnngctgatagccttagcggaactatnccnttcaagagancncacancttanatagncatnttctgtaaaccgcaaggattattttattgcccttatatganncagagttgactgttttactaaagatattttaatnctttntttacgcangaggcttacnncgaaaaaaggangggccagggagattaaanagagagaatcggcaaggcaaagagagaangagaggtgcccaggaataaagacagacacacttaagagcaa

SEQ ID NO: 3173 - DNA, 162 bp, Homo sapiens
  misc_feature (1)...(162): n = A,T,C or G
gactgaggttcatgtgcagaggctcagaagggacactcgtaattgaaaggtgacacagncttgncatcccaactgcaggatattactgtttatagancttangatgatgcntattgatgtncaaagcaagcccagcatctctctccttatttattatattaa

SEQ ID NO: 3174 - DNA, 476 bp, Homo sapiens
actgagacagggtcccacatagtctaggctggcctcaaatttgctgtgtcaaggatgaccttgagtccccgacccttctgcctctctccagttagcaattttctcagtttaacaaagtattcagtggctctcttcctgagtgacgcagtctagactcctcaaagaaaaagatccctcaaataatgatgccatatgaccatttgaatgctctttgagactcctgagatttgtacttggctctttgtggccttatcctgagtcccttggtgtttccgggcaagctggtgcagggtggggcctggagctctatgctaccataccaagtcagcctatgttgtgatttcaaaggattggtttatctcagaaaaaggatggtcatctctttgactgctaatcattttcacctgtgtaaactgctgaggggactggatttagaatgtgagatcactgaataaaatattttgattttgaaagaa

SEQ ID NO: 3175 - DNA, 524 bp, Homo sapiens
ctgagagatgtggatcttctcgggagagggacagagacaaggctgcagctacagaacacagaggagatgaagagaagtaaggctttcccggtgcgacaggtgcgcacagcagtccgacgcctggccttttctgatgacgtggtggatgctgggactccgattcagctggctttttgatagtcctgttgatttcataaccggaccgggagatctccgcctccagcccctggagttatttgggtatctcacttccttttgctctggttgggtcaggccaggtggaccaccatgttcaagtggcctctgtccccatcccctggctcttgtcttcactgctgagacccatctgtcagattcatcttcatcttggcaacccaagatttcccagtgcgtgtaaacacatgtacccgggtcaggtacatgcggcctgagactctgtgttcctttttagcccatggagggttggtagaaaaatttataatattctaacttgagttacacttgtgtgggggaagctatattct

SEQ ID NO: 3176 - DNA, 116 bp, Homo sapiens
  misc_feature (1)...(116): n = A,T,C or G
gccccttggggggcccagganggggccccnttaaatttttacctttttcttttgggnngggggnaaactttcnttccaaaaangggnttccggggnacccaggggaaaaggcccat

SEQ ID NO: 3177 - DNA, 154 bp, Homo sapiens
  misc_feature (1)...(154): n = A,T,C or G
gaacgactcatttttagggtaaaatgaattttcataggataattcctgagaatgtgtcttgctaacattttccgtagtggatgaactgaaaggaaaattaaatggagctttctgtatttcttataatactggcaangatttgttgaagcactca

SEQ ID NO: 3178 - DNA, 109 bp, Homo sapiens
  misc_feature (1)...(109): n = A,T,C or G
gactgaggatctccccaggtctntgnctttactagcttganntcgnactcacaggtcagtgtttctgcctcctgcgtgctgatantaaagacctttgacaccttgccca

SEQ ID NO: 3179 - DNA, 140 bp, Homo sapiens
  misc_feature (1)...(140): n = A,T,C or G
catctgctcacctaccttntnagctatcgcacttcaaggaggaaagangccgctctcaggtatttctcagaacaatgtacacagctacantgtgctgctaaaaggctcttttagcagantggaaataaacgctttggtat

SEQ ID NO: 3180 - DNA, 149 bp, Homo sapiens
  misc_feature (1)...(149): n = A,T,C or G
tttgaggtacctttctgcntcgttgcaggccctaccgggggcgcttacatcngagcngagtncctatcaagtnnctcagnaggtgtntgnngcnanagcaggaagacacttagatacatgtccatctgaaacccaaagaaaaggacgtt

SEQ ID NO: 3181 - DNA, 496 bp, Homo sapiens
  misc_feature (1)...(496): n = A,T,C or G
actgaggtggctttaccagagagccgatccagctgagcttaaagcaatatttttgaaggtcagtataaaggaatctatttgtttcttgttnggtttgtgttctataactttagaagattatttcaaacagctctttatttcattgttgaaaaatttaaaaacataccctaaagtatcttaatgtaggagtcatgaaaggtatcctttattcttttggttttaaaaaatatatggggaccatgtatgtgatttctggtgatggggatatggcttctatttgaatttctttcacgtcatgcagttcaactgaaaaggacttggaggactgaagggtgactcgttaccccttgaggactggcctctgaaggtccggagtggtagcttttctcctacgaagtttcaggatttgcaccagcatcctggaaattctctattgtgccanaaaggactgtcctcccttttaagctagaagangccccattgtttttttttttca

SEQ ID NO: 3182 - DNA, 134 bp, Homo sapiens
  misc_feature (1)...(134): n = A,T,C or G
aggtattggatcaagacagccaatacattgcncatgaacgnatggaaangctngagangtctnctacanggnacatgctnagcaactgagagtcttgaatncctccagtgcacaccttacacaagctaagcaca

SEQ ID NO: 3183 - DNA, 244 bp, Homo sapiens
  misc_feature (1)...(244): n = A,T,C or G
gggggagggccccctttttttngggttattngggaanaattttaaaaaacccgggttccnttccccnttaanggtaattngggtnattttctttgggccnctttctcccccaaacncaagggcaaaacccaaaaacctttgggaagggggaaaaagtttgggnattnggnaagnccccccacccgtttaaaggccnccgggggttggggaaccccccctttttnaaaaaagggttttttttaag

SEQ ID NO: 3184 - DNA, 336 bp, Homo sapiens
  misc_feature (1)...(336): n = A,T,C or G
tgagatttagctcagccagcccccctgtgtgacacatgaaaaaggtccccagatcatgcctgatggatggactatctgctaagccaaagcatcgctatcttcaggagtccaactaanaacgtttgccaatggncatcactgcctgncttgatgnctgttngaccttcctttttaggagggggcaggaangcnaatgggactctcccctgagtatccaaccatncctctnangaagcantatgcacttctgnttaanctgnatgtggcctcannanatntggaagggcctanannatntacaaggggccgnatgaggggaggagactccctctatgc

SEQ ID NO: 3185 - DNA, 516 bp, Homo sapiens
  misc_feature (1)...(516): n = A,T,C or G
gactgaggtccaacgatgacacaagnncacaggctccctgatcacaggtgggtgctttctggttactactccccgggaagtaagaggcagaagaaagaagatcaggcagagggagaccaaggagtagccagaaatgtgaccaagagaaagcagccaatgaaaaagtcactgtcaacacacactgagccagtagacatcaggcaggaccaagagcagagactgaagcgttgtgacccaggcctcagtgtcttaaccaagtgatgctggtcaggggacaaggtagacccttgtctcagcttgttttatgagcctcactgctgccagtggagagagactcacatcgctcatggccctagtaagtgtaagtgggttctacaggcagcaattggctgaaaagctctctctttaagggccacaccgttctgttgtaattgcaattaaatgcnagtgacccgccctcccctgagagttctgggagagggtccaataggcaaataaatattcctccgttccatg

SEQ ID NO: 3186 - DNA, 172 bp, Homo sapiens
actgaggtataataacctgcccaatggtcagcacggggagtggatcttggtgtttctttcacctataggattttccagtttctgctttccttgcctccctctgcagcctgccaagctggcctcgctctgcttccgggtaaataaacctttttagttcccaggaaaaaaaaaa

SEQ ID NO: 3187 - DNA, 241 bp, Homo sapiens
gactgaggtgaggaacctaaaacctcatgtggctcaggaggaaagaattactgggtcacgttagatgcctggaggaagaaggaccagggtcaagcccatccctgcactgccagatcctgggcccttaacctcttgtgtgttgcttcataattacacacggctttgttcctgggacgcacttctagagaaggtcacttggggtgtgcaaataaatcataatggaacaatgagaaaaaaaaaa

SEQ ID NO: 3188 - DNA, 405 bp, Homo sapiens
  misc_feature (1)...(405): n = A,T,C or G
agactgaggcctgcagagagagcccgttagtagagaaganatgcatggatcccctcacactgtttaagagctgaccgacagtctcttaatcggagttcagccacagccaattagccaccaatggaatttgatctcaccaatggaaacagacaaaacctacagtcagctggaagaggtgctgaggcacaagtatgaatttgaggccagtccacgctacagagaagctgactacatacaaccaacacgggactgaaatgtactcctccaagaagggggacgctctcaatacatatcaaaaccctaggcatggttattagacgcctacaaaaacagtctcggataaattttaatgctgttaagacaataaaatgttgcattctccattactactcttaaaaaaaaaaa

SEQ ID NO: 3189 - DNA, 393 bp, Homo sapiens
  misc_feature (1)...(393): n = A,T,C or G
agcccatcagttgggaggaagangcaaaagaagncaggagttcagtatcaccctttgaggacacaggctaaggcacangcgtgagccatacctgcttcaccttggactttctggacccatgggcnggctnagnccccanaggctggtgngagnccagcnntctgcccncaagcnggtnaccacggnctccggcgctnagnacgtgtncaactgtnaccggactgaccaggccaggnagccanaacctgancaangtcccaccaggcccgnagattttcatccttgttagacatgctcctttgatttattagctgttgctcgagntcagacaacagatgnctttcttcttgnccttcacccttnanccgnttataggagcccactctgcatcca

SEQ ID NO: 3190 - DNA, 127 bp, Homo sapiens
  misc_feature (1)...(127): n = A,T,C or G
gaaagaactagagccctaatgtgtgcctaagcttgcctttctgttacattcacactaccaaaaagctgtcttaaatcttaaaatcatanatataactttaaaatttcaattaaacttaaataatttt

SEQ ID NO: 3191 - DNA, 119 bp, Homo sapiens
  misc_feature (1)...(119): n = A,T,C or G
ctcagtgacatggaccttgcgganaccangntcngcagaggacgaagccttccanaantgntcagntgtgncnctgacttcaggngaagagcataactacacatgccatgagcaacctg

SEQ ID NO: 3192 - DNA, 118 bp, Homo sapiens
  misc_feature (1)...(118): n = A,T,C or G
aaaaagggggggaaaaaattttttttttttnnggggnccccccccccctncnnccccccccgggggggggggggaaaaaaaaancccccccccngttcnccccccccttttttttttt

SEQ ID NO: 3193 - DNA, 286 bp, Homo sapiens
  misc_feature (1)...(286): n = A,T,C or G
cacgagacacggactggnnattcgggncaccccttagctccagctcactgnggngcntganacctgaggnccatctgggnnnttntggannccanactagnctgagagaaactagantctcgggattcagngnnacancctgnntcagacacactgangcagtgagagaagctggacgcctgatactctcttttggcccccatgagcacgcacagatgtatctgcanacatccgtgcccccacacatacccgcacccacacaaataaatcaatcgttaaaacaaaa

SEQ ID NO: 3194 - DNA, 186 bp, Homo sapiens
gactgagggccaggattccgtccccctccatgttggacgactcacaatgacctacgactccagctttaaggaatccaacaccttctggcctccatggcacttacccactcacatacaaaagatgaaagatcaaaataaacctcagaagcaatgaatacacagtgaaattatggaaaacataaaaaa

SEQ ID NO: 3195 - DNA, 151 bp, Homo sapiens
  misc_feature (1)...(151): n = A,T,C or G
cacagcagccttgganaaggaacacgaggcggatcacctttttttnatttatgtaggacttnnannctcattaggganctatcgaggatcgatgcctaggganttnctcacctttcccagaggactatgnngaancagcccaaagcttttg

SEQ ID NO: 3196 - DNA, 365 bp, Homo sapiens
  misc_feature (1)...(365): n = A,T,C or G
gactgagttccgagcaaatgttcagggcgngctgnccaccctgcccaatccngaggactacttcctccttcgatggctccnnncccagaagctttgacctgcagaagccanaggccatgctccgaaagcntgtggcattccngaagcatanggacattgncanaancatnngctggcagcacancanaggtgatccagcagnatctggcaggcggcagatgtgnntacnacttgaacggctgncctgnctgntacgacatnntcngccctntgnatgccanaggtctgctgntntccgcctccnagcaggacctgctcaggaccaagatgagagactgtgagctgcttctgcaggagtgtgacac

SEQ ID NO: 3197 - DNA, 125 bp, Homo sapiens
  misc_feature (1)...(125): n = A,T,C or G
ccttgtcaggggcagantgctgggtcgtcgagagcnccncccactncttataggaacagcccaccnaattncatgaccgcaaccggaangaatacnannatcccccctttttgggggggcccttg

SEQ ID NO: 3198 - DNA, 145 bp, Homo sapiens
  misc_feature (1)...(145): n = A,T,C or G
gctttggagatgctgcccagacactctgngccnggacaggatactcncgnnttngtccgnatgactgagctcactgnagccactggagaacgccatgacgccntntatgtgnagggngcgctggatgagacactgccagctgaag

SEQ ID NO: 3199 - DNA, 178 bp, Homo sapiens
  misc_feature (1)...(178): n = A,T,C or G
ggggaagagagaagaggggggagagggangggagaagagagagnagagaagaagaagangggagagggaganggagggngaggaagnngnagangagggggaagagaaggagngaggagagnagaagagaggggagagagngaggggggaagaagagganaggagagagagagaagag

SEQ ID NO: 3200 - DNA, 157 bp, Homo sapiens
  misc_feature (1)...(157): n = A,T,C or G
tggcggagtttgttttttttttgggggggcctttgggcnaggtnaaaaaaanaccccntnggggggtcccagtcnnggggccccnttcaaanattnacctttttancttttgggttggggggtaaaacntttntttcnaaaaaggggtttccggggg

SEQ ID NO: 3201 - DNA, 163 bp, Homo sapiens
  misc_feature (1)...(163): n = A,T,C or G
ccacgggttctagcttgcggggagnnntggctgccttcccntcgcgaggcctgcncacttgatttccatcntccttcttgtgcacaaaaaaaacggagcgtcngcggantcacgcgaggcgcacatcattangtcnctgagctggagagagtcttgttccttt

SEQ ID NO: 3202 - DNA, 173 bp, Homo sapiens
  misc_feature (1)...(173): n = A,T,C or G
gtgctggtcagcatgactcgggggntgaagntgttaagnataccagncctgggggacntgagttccaccntgangcctnncttagtaggtgacanctgagagcctctgacttccacatgcatgcactttgnagtanggtattgcaaacacccnaccntaccagtgagagaatg

SEQ ID NO: 3203 - DNA, 133 bp, Homo sapiens
  misc_feature (1)...(133): n = A,T,C or G
tttccaggggcattgggccaccaaggcccaanaancctaggagcaggttacttaacatncttttcnttccccaaaagggcttggctnagttggggaaagaacttgnanctttcccagggccaaccttgggaag

SEQ ID NO: 3204 - DNA, 144 bp, Homo sapiens
  misc_feature (1)...(144): n = A,T,C or G
gcccgggggggggttcntttttnacgaagaatatnntnttttttgttttttttngncggncggccgcgnggagncgatccttctnttgtcncncctcttcccccgtccnccaccctttcccttctcaatatcgctcacaaaata

SEQ ID NO: 3205 - DNA, 291 bp, Homo sapiens
  misc_feature (1)...(291): n = A,T,C or G
ttgggggaggggaacccttgggggngggtnaaggcccangttnccgntaaantanttnccctttaanggcnaangggccaaggnngggggcccccataataaagggcttttttctttggnggcntttttcaacccnccgtttgnnaactttttaanttttccaggcccaaggggaaggccaaagntttgggcccaanggggttttggnaccccgggggaacccccttttaaaaattnacccccccaaggggancttgggggaaaaanccctttggaacttttgtggtttcc

SEQ ID NO: 3206 - DNA, 157 bp, Homo sapiens
  misc_feature (1)...(157): n = A,T,C or G
tttttttttttttttttagcnccttcaaccaaactgggcaagggttcaaccattgagctacncccccgaccctcccttccgntgaggctgcnncagtatcaccagnnagagtntaggagatncaacgccgntcangccgntctacccactgagccat

SEQ ID NO: 3207 - DNA, 258 bp, Homo sapiens
  misc_feature (1)...(258): n = A,T,C or G
gactgagagcatgctatgagaggtccatggagcnccctagtgcttnccagcncctcantggactcagtcntctgnagccctganaactcngngnaggttgacnggactanaancagcannccagnnacnactgnaggtnagaggatgcaggtggaccaggctctcagcagctctgcccctccccgccccccagcatctcctgcagaggtccctggagccatttattccagtaattataccacatacgaccctcagcag

SEQ ID NO: 3208 - DNA, 123 bp, Homo sapiens
gactgaggcctgtcctcccggctttctgaaaaggatcttgcaaagtccactgtgtacagaatgtgcggaaagaacacttcttgggaaggaaagaacctcctgggagatttgtcagtttaaaaa

SEQ ID NO: 3209 - DNA, 169 bp, Homo sapiens
  misc_feature (1)...(169): n = A,T,C or G
tccagagcggcttggcgaggccagtnatcgntgacagccagaccaanagacctgncggcccgcacaacncnganctgtccttacctagaggccanaggccgncaggnanccaaggccgcgcgccgagaaggcggtggctccggccccnagagngacttccgtcgcggcg

SEQ ID NO: 3210 - DNA, 290 bp, Homo sapiens
  misc_feature (1)...(290): n = A,T,C or G
ccaaggaaggcagggtaccaaggacttctttgggtncactgggnccctcnaaccccttcttagaacatcagggagtggcaaagccttacagaacacagcatccccggatgacgaacagctctttntatcatgggcctgngcnccctgggaggagaaagaatcaactnctgggaaccagcttggnccnttaagtaaaaaggactttttcccttttnataaaaacncnccttggngnggngggaaaccccnancccccnttggcccagggttgggnggaaatttttcttatt

SEQ ID NO: 3211 - DNA, 144 bp, Homo sapiens
  misc_feature (1)...(144): n = A,T,C or G
cccttttttccccggggttaggggttncntgggcccctttgggaacttaaggcccacccaggctttccccnggttgggntgggggnaccccttggcccctttaggaactttggaacngaagggggttggggcctttaaaaggaa

SEQ ID NO: 3212 - DNA, 184 bp, Homo sapiens
  misc_feature (1)...(184): n = A,T,C or G
aggggggtttcccccctttcccntnttttaaacccccccacccaaaaccnnagnnanaagggggtttggggnanagccccaaaaacccccgggggncccaaggggnaanaaaaagggggggaaaaaggccccccaaggnaagggggcccggnaaagggggccccggaaaggtaaggggggaagg

SEQ ID NO: 3213 - DNA, 262 bp, Homo sapiens
  misc_feature (1)...(262): n = A,T,C or G
caggcccctgggttccttggnnancctttggctttggtnccaggccgggatggnaaagganggaaaaaaacccaaaactttggccccagggggaaggggcncccaaccccccccanggggggtttttttcttttnccngaaccgggcnagnaaggggacctttttgnnaggggnaaggggcccccggttaaacccaaggcntttttttgggggggggganccccccttttttcaggngggntttttcccccggggaaaaaaa

SEQ ID NO: 3214 - DNA, 154 bp, Homo sapiens
  misc_feature (1)...(154): n = A,T,C or G
ggcctgcctggggccactctcntcgnntgntacngaaggangtatnctcctatctctttggcccttcagngntaccggaaaaanaaaaccgtgaaggctcgnaggctgagntgngctcctgccggntgggagagagatcctggttttgatacta

SEQ ID NO: 3215 - DNA, 152 bp, Homo sapiens
  misc_feature (1)...(152): n = A,T,C or G
tttttttttttttttttnctgttctgttcctgctnggggnggggangagaaaacaaacngctnttttnntttttnccagggggttntccaacnnagaggacntgaggaggccgcaacagctctgaggacccttcaggtgttaccgaaaaaat

SEQ ID NO: 3216 - DNA, 532 bp, Homo sapiens
actgagttccttccggttccttctgtgctgctctgcaaacctgagaagcaagatgattgtactggaaaacttccatgattttcctgttctctccctcttcctcattccacgacactgcacatccaattccactgggaagcacttgtttcaagggtgtatacccctggattcttcaggagaattagcaccataaagcagactttcatttttcacttttatactttagggctggacggatttgtagaactcatttcttggaagaagaacctaagagttcacatttttagtcttgcatttagggccttccctaattttctgaatcaaacaccagcctgacctttctcctactgttttccctcagagtaggcctatcttggcttgaatttgtagcctggttgaggcttctaagtgctgagattagaggtataagctgcaacacccagtttaccagtctgattttctaaatctctatcttttgctgggactggacacatttggtactttccatacacaaaccacccttttttttttt

SEQ ID NO: 3217 - DNA, 209 bp, Homo sapiens
  misc_feature (1)...(209): n = A,T,C or G
gatatgtatagcaagttattacctccagggcttgagnacaagncagnactcgggaatgactggtatacttttctgggacattgaggccagaaaaaccaagcaacaaggagttccggggtgggaacctaagcttccctctgtatctactccagggcttggcacagactttgctatgtagctgctcaataaatattcacagaactgagcca

SEQ ID NO: 3218 - DNA, 194 bp, Homo sapiens
  misc_feature (1)...(194): n = A,T,C or G
gtttaaaaccccgaaatatngnttcgggatcgcntgaccccaccnttgtncccntcaccccaaccgtataangttggtccaatgtgaaccntggggtgtngggaccattcggggcgttggggatacggaaaaaatttaaatgtnggtaaccgttccgagtncgaaaacggnggtaacggagtcgtgggggttgt

SEQ ID NO: 3219 - DNA, 313 bp, Homo sapiens
  misc_feature (1)...(313): n = A,T,C or G
agctcgctgggacaangctgccttnccgcttgtttnatatatgntngncttaccnannanngngcntnntgnntcagaaagagagtttgnaaagaaagcngcattagacactgggccagggaccacgaagagagaanagtagcancgccacccaacggacctgtgcctgctgcaaatcggacgcttaaccagcccgcccccttcgggattgggccagagcccagacatgccaaccaatcatcggccacagacngatntctttaacgcgtgaatcaaggtcacactaagcgttnganccagagaggtctgccgc

SEQ ID NO: 3220 - DNA, 390 bp, Homo sapiens
  misc_feature (1)...(390): n = A,T,C or G
cggagcctagcccagcanccaaaggctcagtaatanctgaggaagcacccgcatctctccctgaacatactcttacagtnagtngaaattaagaggctggcgacaccaagggggcgagctggaggagacgccaacgctttctctctagccagcccggctcgcttccggaagacgctctgtccaggggtggnccgctncgcctgctctcttncgcttccggtgtcctacagccanggccgccgccgtcgctgcagccggcgctggggagcctctgtcccccgaggaattactcccgaaagccgaggcagagaaagccgaggaggagctggaagaagacgacgacnacgagctanacgagaccctgtcggagagactctggggtctgacgga

SEQ ID NO: 3221 - DNA, 489 bp, Homo sapiens
  misc_feature (1)...(489): n = A,T,C or G
cagtccagcgatgctctgcccaagcacatggagaccaagcagccatganctgnttctgctgaanccatacagcanatctttgctactngactnancataactngacagttgaggttgnnctgacaaacttgggaatgacctancagctgaaaaagcagtggcatgctcccggatcggacacttagcctctgcctgaggactgaacccttctggcactgcctggggacccacaaaggatactcatgcccctgtgattcctgccagagccaaagaccggttcctgagcagcaccacaagtcctgagccctgttgagtgcccagtccctcaactcagtcccaatgagacaggactttgtattgtcctcggccacagagttgtggaagacgttgaacagccagctgtcggatggctgaaggagcagcttgaagagttctagagtggccagggcagaaaaaagaaaggaaacttgaaagagagaaaggaaagtc

SEQ ID NO: 3222 - DNA, 178 bp, Homo sapiens
  misc_feature (1)...(178): n = A,T,C or G
ttccctctgcgcccagaccagataggncggctgcattangccacccacggccttgtggagancccnagacagcaaacagcgtntttnganttcctgtgggcanaannctncattgtnacagngngacgtcacctncctgacctgcccnacgagggnagcgaaccccagccatgctggt

SEQ ID NO: 3223 - DNA, 116 bp, Homo sapiens
  misc_feature (1)...(116): n = A,T,C or G
gtgaggctgatcagtgctcctgcccggttgnnagagagatcctgnntttgatactanattgcntanttaananntgataatttggtctngcacatatttaaaataaatatatatgt

SEQ ID NO: 3224 - DNA, 101 bp, Homo sapiens
  misc_feature (1)...(101): n = A,T,C or G
tagacttcgtcacgtcctttgacctccacacctgnntgacancntgctcacaccagcactcgtgaatgcaaacactccaatcacgagtaaaaatcaaaaaa

SEQ ID NO: 3225 - DNA, 195 bp, Homo sapiens
  misc_feature (1)...(195): n = A,T,C or G
tcctattatccactgcntgcgagtcgagagaaganacgctgagctgnttngntatgncctgnngtctatnccngcagggccagctgggacangaaaggtgaggctgagagnncgcctnnccgttgagggggagnagagganccggaggannggctgactgaaggtggcccaccttgccgctctgctcaacggagg

SEQ ID NO: 3226 - DNA, 155 bp, Homo sapiens
gactgagggacttactggctaactcctgctcctgccgcttgtcctgtttcagctccagcagccatttcctaatgatgctatttgggggtacagatttcagagtcatacacaagccacgctcgcaggtgtgagaaatgatggcatcaatcaaccgt

SEQ ID NO: 3227 - DNA, 357 bp, Homo sapiens
gactgagttctgacgtcagcaccaccacctggaccctgaggaagcagctggcttcgtaggagcctctgggaatgaaccgtatgcttgaagagccgctcccgccttagccgctcagagaccagggctggaaattaccttatccgtgggcatactgggccacctctaagaggccagtctcctctaagagcggggcatcaggaagaggacgtgagtcctcagaaccatgaggtctttttccagaattgttaactagtgtgagcattttgtccatgctgaccagagaggtattgccatgtgagacaaacacaacttaactgtgagaataaacattgaagttccctcctggaaaaaaaaaaa

SEQ ID NO: 3228 - DNA, 156 bp, Homo sapiens
gactgaggcaggtgctatcgtgatgatctccacttccagatgagaaaatggaggcacagagagatcaaaggcttcttcaggcttcttgaatgaattaggtataagcaaaaactgaaaagatctgcagtgtccagggatggggtgggggtgggggtg

SEQ ID NO: 3229 - DNA, 416 bp, Homo sapiens
  misc_feature (1)...(416): n = A,T,C or G
catctattagaatgacagaaatcaagaacactgctgtcagtatgctgcccgggatgtgaggccacaggaacacacacggctgatgggaaaaataagtgatgccgnacgctgttcatatngtggctctgacactggcctgnggttggagtttcagctctggaatgattgnantgcctcacgnnncaccttctaattgccanagaancncaccatggnaaagntngaggatccttggttggcnagaggaaccacgttacttttccatgaggagtccatgtaatcttaaattcatggaataggggaggggacagacgtaaacacacatcaaattggtcagcatcgccgacctacgtaaaaaacagttctgtgtcattaattatcanaaaatacaaatcacaaccattaaagacacatga

SEQ ID NO: 3230 - DNA, 104 bp, Homo sapiens
  misc_feature (1)...(104): n = A,T,C or G
gagctcgggacccggggatatnatgtcctatggcgagaggtgcctantctctagaaagtataggaacttctngacctgcaggcatgcaagctgggggggttttt

SEQ ID NO: 3231 - DNA, 129 bp, Homo sapiens
  misc_feature (1)...(129): n = A,T,C or G
ttttagtgcaccgggcaacccctcctgcgccggggcctganaatnaagggctatnatttttnnttctcaggagnacnccggcggnangagttccaggtcactctggnanatctagagactctcaaataa

SEQ ID NO: 3232 - DNA, 166 bp, Homo sapiens
  misc_feature (1)...(166): n = A,T,C or G
taactgacttcctaaacactgcctgcngtctgcctcnaggagagagctggctncagcacctgaaatggccnnttagaaatttgncttgcatgggcccttggnanncttggtaaaggtctcgaatgancctgttaaagtctatggtctttgccccatgtgaaccata

SEQ ID NO: 3233 - DNA, 114 bp, Homo sapiens
  misc_feature (1)...(114): n = A,T,C or G
tttacaaactgacaggtnggccttnttccagggatgcnccgccggagagnactttnaggagnccgtcncatncttttnaangacccttcagctgtttcctggaaaataaaaaaa

SEQ ID NO: 3234 - DNA, 214 bp, Homo sapiens
  misc_feature (1)...(214): n = A,T,C or G
ttgggccttttttggttccccangnccgggntntggggaaaaggggaaggaaaaaaaacccaaaaacttnggccccaggggnangggcnccccancccccccagggggntttttctttccccggaccggggangnaagggaacttttgganggggnggggccccgtnaaccaaggnttttttgggaggggaccccctttttcaaggggggttta

SEQ ID NO: 3235 - DNA, 350 bp, Homo sapiens
  misc_feature (1)...(350): n = A,T,C or G
tggccgtcctctgaggccctaccagnacctgactgagatagntgcacttacactcacccactggactgaaactgggnaccnntctgaggaattaagggaaggactganngacctgnaccnggagttatttacatnatnanaccagcanncttgttctntctgnntctcggttgnnggaggcagacnatgtttcntctacctgacgtctgcacnnactgggctanatgaaatcncncctcaaaacagtctatctnatncntggcccactgacttccncatagttgtcctctgacttccacatgtgcccccacccaacctatanatangtaaataaataaatgtagtgagaa

SEQ ID NO: 3236 - DNA, 133 bp, Homo sapiens
  misc_feature (1)...(133): n = A,T,C or G
gacataaccggctttgggaagctttctaactatccaggagccgctgaagcggccaggnatcccggnctgcctgnttgcatnctncagagggaggtanttnncctgatnacaaggctcgcagaaaataaactgc

SEQ ID NO: 3237 - DNA, 249 bp, Homo sapiens
tgagataaagctgcccagaggagccttgattatctccactggagtcacctttggacaagcccctgcactggtctttcttgaagatcaccaagcaacatgtctcaacactcagccatggttgaaacgtgcttgtatcttgataccagaaatatccatggcctggcttccttcgtttccaaacatttccattttcaggctctgtcttcgggagcatttcaaaaccgagaagcagctgtaaacaaaacaaaa

SEQ ID NO: 3238 - DNA, 120 bp, Homo sapiens
  misc_feature (1)...(120): n = A,T,C or G
tcttaaaatgagttcgccgctctgggncttgggggcggctgacacaggaagctcagnttctttttngagcgcgcctaattttcatcagncnganggtgctattctgcagattgacttgcc

SEQ ID NO: 3239 - DNA, 132 bp, Homo sapiens
  misc_feature (1)...(132): n = A,T,C or G
gaccccggcccgggcctgcnggatcnagggtggagcttcctgcttttcaatctgcccgcagnctgcactaaanggaggggcctcancctttncacctttntcctggacccaagataattcggcggaaatggg

SEQ ID NO: 3240 - DNA, 253 bp, Homo sapiens
gagtccaggaggggacctggtcacaaaagctgaatcaaggaccctgaaaccaggtgacctggataaagcccaacccccttttgtgaaaatatgattggtcaatgcaacagaccaccctgctccccctccctttttgttcccatcctataaaaatgttacactgtctgtctcccctggggatgcagtacagatcccaaacgggttgcctccctgagcactcagaaaataaaactttactttttaaaaaaaaaaa

SEQ ID NO: 3241 - DNA, 145 bp, Homo sapiens
  misc_feature (1)...(145): n = A,T,C or G
agaggccataattacttgcttgtggaactctcngaggncaggacaggaagnatggctgnctccatactgagatgaaanaagaatctgntgancganancaccngcttatgcggccctancctctnngancggcgacaagagtgat

SEQ ID NO: 3242 - DNA, 381 bp, Homo sapiens
  misc_feature (1)...(381): n = A,T,C or G
gactgaggtctgggacctgtcctatgggggacatgaagacccctgatttcgatgacctncttgctgcttttgacatccctgacattgatgcaaatgaagccattcactctgggccagaagaaaatgagggaccaggaggccaagggaagccagaacccagtgtaggaggagattctaaagacagagaagaagcagcagccgctgagaatgaccctgagagtccagctgaggcctctgatcatggccttccacaaccaccggatacttctacagtcagcgtcattgtcaagaacacagtgtgtccagagcagtccgagagcctgactggggattcaggagaggaagagaccaaggctgggggtataactaaggaaggacctg

SEQ ID NO: 3243 - DNA, 404 bp, Homo sapiens
  misc_feature (1)...(404): n = A,T,C or G
caccagagtccctgtatcagngggcgggtccgcttntctaanngaggaangttaccctctccctgctcagaccctgacaatggnctcagtccgtagcatccaaaggaccacagctctgaagaaaagaagatctgctaagcacagcatcccttcctgaatgttcccaagcccatgtccaaggcatctcttcagccacaaagtgcgagccgccatgaacgaggggcttgctgcggctcagatgtggatattctttgttcaaaatcaaacctttcacacggtccccatttcatggctgtacaatttctggctgcggngctgnctctaatcaaacaccgttccaggaggtccacaaggaggnatccttgcctgncttgagatgancaccttggcttgctgggagcata

SEQ ID NO: 3244 - DNA, 333 bp, Homo sapiens
  misc_feature (1)...(333): n = A,T,C or G
gactgagatccctgatttatgctgaccaactgactcacatgtgcacctcaccaacttcaacgttacagctggcaataatggaaaagagcantcatgtggttgtagctttgacccacatatcaaccttgggacttanagaagttgaaacactaataaatataacctccatgtggccagccaatntaatnctggtcacaaaatgaggctnnnatnntggcngnactctnanacagtgggnntgctaggctgntagtatacactcncatgacaggaagacaacatgttctaaggacaaagntaatgaatggacaatcgnnacccagcatcattaag

SEQ ID NO: 3245 - DNA, 102 bp, Homo sapiens
  misc_feature (1)...(102): n = A,T,C or G
cagtacgcagaggcactagagnctggactgtcatgaagggaagctacagctcattactactaaaaagcacaccatgggtggaaagttaagatgcgaaggaaa

SEQ ID NO: 3246 - DNA, 408 bp, Homo sapiens
  misc_feature (1)...(408): n = A,T,C or G
aacagacagtagtggcncagantgactggactnccangngttgtctacggtncagnatgaanttgancgcagttgagnaganagaanngtgagaaaacggnactgggctcatttccctgctgaaganagntcttgancacantgagttgacngnnagacttgatccgagggancctggntggaggctggnancacancctgntnctggagtttaaggcaagatancaaaagctacncgaaacgcccaggagctggctggatatccctggaacattntgctttttacatcaaggatgcnctgaagggctagatgcagcggaagggcccagctggaggggancaaagcatcaaggggnttgttctnctaatccacggncaggaattgttggccaaatatgaaagtgagac

SEQ ID NO: 3247 - DNA, 164 bp, Homo sapiens
gactgagctctttatcttttctcggtgagggaatcacaacccaacccaggcagctgcccaccagcacccattctttccacatggcctcaagaagcactgctggaacctggaaccgactctgaatgagaaggaagaagagatgtgacccatttaaagaaaaaaaa

SEQ ID NO: 3248 - DNA, 181 bp, Homo sapiens
  misc_feature (1)...(181): n = A,T,C or G
acagaagtaccaggtcttccctcnccagccaccgcncctngggcnantgcananggaaaatctnccnttaccnacacgtggcctaagagaaaccagtacgngggcnattccggagaggccnggaatagggagngatgganngagaaggttccaggnatggccnttactcacgagcaggccc

SEQ ID NO: 3249 - DNA, 104 bp, Homo sapiens
  misc_feature (1)...(104): n = A,T,C or G
gactgaggagttttagaaatgctaaccgagctcaggttttgaacatgtctgggactgtgaattggctgccagaatgaaccnnnggcaagcacagagctgataga

SEQ ID NO: 3250 - DNA, 514 bp, Homo sapiens
  misc_feature (1)...(514): n = A,T,C or G
gactgagagtggcccgagttcgtgaggactatgccccgtggtgggccacgcacacgctggactggctcaagtttggcaagacngaanntgntggnntngttagtggncctgaagcaggacttgtttacagcagctggnccgcatggtcagcctgctgggctgtggcaggtcagggaggatcggctgctgtgcgtggagagccagaaggacggcaacttcaagcgctcggggctgcgcaagctggagtatgacccttacacagccgagatgcgcaggaccattgccgcctacatccgaatggtggacacggcactacgtagccgcaacctcactggggtgcctgatgcctatggcccaagatgatgggcagccagggagggacccagcatccggtgccccttggcttcaaagagctggcttccctctggcacaaagacagccccaggcttctgcctgccttcagaaaggcccctctgaggcctcaggaggaggagatatctagacacctttccct

SEQ ID NO: 3251 - DNA, 247 bp, Homo sapiens
cacttcagagagctctgcacgcggcacgccgggtggacgctgaggattccccagtgttcagaatccaaactcccgcggcgtcctggtaacgataacaactaaccacgtgacgatctaagcggaaatggacgctctaggacacacctacttaaaatgaacttcacctcagccacttttctggcggaaatcggtattgcccatataccctatcgcttgcaagcactaaagttgtgttgcgcatgcctac

SEQ ID NO: 3252 - DNA, 365 bp, Homo sapiens
  misc_feature (1)...(365): n = A,T,C or G
gccccagtgtaaggctcgaggagntgagctttgctcctgncggtgaggganaaagatgctngtttctggatcctacaaggcattctgnnnttgantntncagctctagnacnananntaccataangactgnctcacagagccacntctgttatagaagacataggagctctcagagttctaatcgtatcatgtgtgaaagagctggagagctgagtgcaaggccagtctggtgtatagagtgattctaggacagcaaagactgcatggtgaaaagttatttaaatatacataatttaaataacttaaggaatttctttttttcttcttcttttctaagcctcttaaggaatttcttaactaatg

SEQ ID NO: 3253 - DNA, 227 bp, Homo sapiens
  misc_feature (1)...(227): n = A,T,C or G
gactgagcgaacacgttgcttttgantggaggtcacccaagcaaaagcncaagtactgacagtcttcaaagaacaatgccggtggggatccttgcagcccaggtntctccaaggctgnactgagcanaagctgangttncagaaggcagctcangctgaanggtgaaatcaagtcctggctactactccttcngccatctttanagtcnggtaggcccacatgtgga

SEQ ID NO: 3254 - DNA, 101 bp, Homo sapiens
  misc_feature (1)...(101): n = A,T,C or G
ctgatgccctcttctggtgggtcttcagaggacagngtactcaaatacatgaaataatttttttttaaagacaactacagngnactcatatacatataata

SEQ ID NO: 3255 - DNA, 226 bp, Homo sapiens
gactgagcctagtggcgacccctccaggccgggccaggcgcagcactcgaggcaagcgcggcaagctcctgcgctctccaaaggatcccgtgcccctcggggctgccgggtagggtaatgccctcagtaatggagaagcccagtgcgggctccgggatcttgtcccgaagtcgggccaagacggcacccaacggcggacagccacactcggaggatgacagaaatc

SEQ ID NO: 3256 - DNA, 453 bp, Homo sapiens
cagactgaggacagacacttcaggtcagtttggagactcttcttccaattgtcactgaaatggcacaagccacatcaatagaggatttttacctttagtgacaattttcttctctagttctggagatggaaccccaggacaatggccaggctccatctggtcactagccaggaagaaaggcagcctttggcccctggggacagtggcttcacaaagcatagagagaaaccttgcaaaggtgacatcctctgcggatggcattttccataagatgcttaggctgctggaaggggaccaaactgcatttaaaataggagaggaatattcctgcagaaatctacaaggacaggcagggggccaggaggagtgacatcatcctgtcggggaacaaatgcaaagcatgtgtagagctctcacctttaaggatgagtaagcatgaaaaaatacatatgt

SEQ ID NO: 3257 - DNA, 243 bp, Homo sapiens
  misc_feature (1)...(243): n = A,T,C or G
acgatattggagctgagaaggacaccttgggtcctggcacggactattctgagganaggannaaagacacttnnangctgtcatatntgcatntttcccctcacanagganagatgtaacggtgagctttgnagcatgaatcataactttnattgcttgccagtcacctggggaggcaatgttgcttagtgggctccatttccagggccataataataaaaactacacggaataaaataaaaa

SEQ ID NO: 3258 - DNA, 508 bp, Homo sapiens
  misc_feature (1)...(508): n = A,T,C or G
tgagtgtttcccatggagcctagaaacttactcatggaccaggcaacgaggctggctgctcaggaggaccctgggatcctctggcttgtgcctctcctccacaagatgaaaacgtgtacttcccgcagtgagaaatcaccccacccactcaggaaagcaaggagtccattctttcagctctttactgaggctctcacaactgcctgtgcctgctactcaaagggtctctcgatgtagtcctggctgttctggaattcactatgtagaccaagctgaacttcaactcatagaaatccacctgcctccaccccaagagtgctggggctaaaggaacgcacttcactctgaacaatttaaacagagaaggagactataaatctggccacttaggcagatgggaggtttacacagcaaagacactgcatactgcatacaactgagcagttgttaccaggaccgncttgcctacctggcagaatcatgctcttcctgacaagcccacagaaga

SEQ ID NO: 3259 - DNA, 214 bp, Homo sapiens
atttaactttttaaaaagcacaattcggcaaccccgtgagaaatccaagagctgggcaaatattctttctgagaagctctgagaaacctgagcatgggattcctccatgaacgtttgcaaatagaatgttacctttaattcatccttgcgtcctttgaataactgttttgttgtttcaataaaggtcagaaagcttattgcacagaaaaaaaaa

SEQ ID NO: 3260 - DNA, 180 bp, Homo sapiens
  misc_feature (1)...(180): n = A,T,C or G
ccccaagggtttctccngacngagagngacttgaggaggccnttacagctctgaggacccttcannagctaccggaaaaataaaaccgngaaggctcggaggcttgagccactgctncttgccgggangngagagagatcctggtttttgatactaacaaagcntattttttttttgata

SEQ ID NO: 3261 - DNA, 279 bp, Homo sapiens
tgaggttttcttgtaagcacttcgcagtgactattcttcagctctatcagtctttcatcggagtgagttgtgttccagagcttcaatgggctgtcagaacctgtaggagagaagatagcatgacaacagattatgtgtgagtgtattttgcacacagggactgtattttcacagtcaaccactcatatgttgagaagtaagcactctatacctgtagtaaagaacacagtgttaaattctgcaaataaaacaaatgagtccttgcgtgaaaaaaaaaaa

SEQ ID NO: 3262 - DNA, 502 bp, Homo sapiens
  misc_feature (1)...(502): n = A,T,C or G
gactgagatgacatccatgtttgaagctttccacactccttcnagtctccaagagccttgtgagaagagcaggaggggaatacanaagtagggagaacacagtctcaagcttggtcagantcgactcttcctgtgttgcagaaaccggttcttctaggagcgttgcagactganaggaagctgccctgccaggggacagctgtcacctggacttgntcaacaccattagaaatgaattacatcagcactcaggctgttcaacggaaggttttagaggctttccttaactaaaagacgtaggtgaagagatgggcttgctagttagcctgatgtaacactttcaaattattacaaatgcatatgaaaatatcatattacaactcacatttaagactaaactttaaaaacctactattattattgnagagtgtgggcacctgtgtgccagggcatgaacatggttgtcatgggataaaatgttaaattatttaaaaaaataaaa

SEQ ID NO: 3263 - DNA, 117 bp, Homo sapiens
  misc_feature (1)...(117): n = A,T,C or G
agaaaaaaactgacangaggcccanccaagggtttntngngacggagaggactngaggangccgnaacagctctgaggacccttcantgttaccggaaaaataacaaccgtccaagg

SEQ ID NO: 3264 - DNA, 105 bp, Homo sapiens
  misc_feature (1)...(105): n = A,T,C or G
caaaggctgggatcacggnnggctcccgataanaggatcttgccttcccccangcttanncagggctctnggnccagnctcctgccctgtgatgatctcgggccc

SEQ ID NO: 3265 - DNA, 154 bp, Homo sapiens
  misc_feature (1)...(154): n = A,T,C or G
gcacctgtcggtcgccanaatgagaattcnaatgagctgcttgaacatggntgtagnancagggnnggaaattccaanaancagatctgggatcccatngtgtnatttattcggagagagaagcncagagtacctacgagccctttttgtctac

SEQ ID NO: 3266 - DNA, 148 bp, Homo sapiens
  misc_feature (1)...(148): n = A,T,C or G
atggaggaccattggactggcnctgtnaaactgnaancgagantgtnattaaggcgcnagncattgctattgccgnangngagagagatcctggttttgatactagaaagcatagtaaaattgataatttggtctagcaaaaaaaaaa

SEQ ID NO: 3267 - DNA, 121 bp, Homo sapiens
  misc_feature (1)...(121): n = A,T,C or G
gggaaccgggacacactgnaacgcagggtgctntntaacaagaacttggtgagtncatgcntanctatacnncagctggccggngacaatntntagtacaagaaacacccctgtagaatga

SEQ ID NO: 3268 - DNA, 153 bp, Homo sapiens
  misc_feature (1)...(153): n = A,T,C or G
tttttttttttttttttgagggattgttttaaacntnacnctggggggggcaggctcacnnnagaatctggnntttganggggggganacaaagcccaaaccctttnttntttttttttcagnngaaagcttnaaaatttgagggggcggggg

SEQ ID NO: 3269 - DNA, 203 bp, Homo sapiens
  misc_feature (1)...(203): n = A,T,C or G
gactgtgccgcactgggaatggtggcactttgtctgtgatcctagcaccctggaggcagagcagagatcagccagttctagaccagccagaattacatgggtgagaccttttgaggagaaggattaaggggatggagaagaagtgttgctaaatcttccccagagtaatcaaattggagaggngacaaccaaaggacatttct

SEQ ID NO: 3270 - DNA, 130 bp, Homo sapiens
  misc_feature (1)...(130): n = A,T,C or G
tgcaagccggcctgtganagcgaacataanaccatggcttgnttagaagagacctgnncggccagctgcgcttgngngganangatgaacatgnatantnctccattttactaacccggctacattgcga

SEQ ID NO: 3271 - DNA, 112 bp, Homo sapiens
  misc_feature (1)...(112): n = A,T,C or G
tcccgggcgggacctgtttnngaagggctatnnccctanattatnaggaggacaaggctggnnaggagttccaggtcactctgngaaatctagagactctcaaaaaaaaaaa

SEQ ID NO: 3272 - DNA, 125 bp, Homo sapiens
  misc_feature (1)...(125): n = A,T,C or G
ttccaaggttaaaggttcttcccttggcccttcaaggcttatttccccaaggttanccctgggggggaactgggcaggtttttttaaaaaggttnnccttggccctccaaagtttttccaaaccc

SEQ ID NO: 3273 - DNA, 116 bp, Homo sapiens
  misc_feature (1)...(116): n = A,T,C or G
cggccctaaaccctctctccggngagncganagcccaancangtcccccgccnttttttcagccangggttctccttgccactcnanccctgnccaccaacaaacaaactcccaca

SEQ ID NO: 3274 - DNA, 125 bp, Homo sapiens
  misc_feature (1)...(125): n = A,T,C or G
tttttttttttacgcgnctccggtcttttnatncttganaggctgggangtaanaaacactcgcncgcganacnacnaccacggcgnctcacctcctgaagctccgcccctctcattttttttat

SEQ ID NO: 3275 - DNA, 176 bp, Homo sapiens
  misc_feature (1)...(176): n = A,T,C or G
ttggggggaaatttaaactttngggggtttttaaaactnaggggggnaaccaaaccnaaaccttttcctttccccccaaaacnaattttaaccaaggcccaaaaccccaaacgggttggggggcccnnttttncnntttgggctttgggggaaaccatttgggggggtttgggaag

SEQ ID NO: 3276 - DNA, 348 bp, Homo sapiens
  misc_feature (1)...(348): n = A,T,C or G
agttctccagtccccagaacaccccggacatgaacctgcatatattcaggacatacaaacagcacatgtggctgaacagctttgccaagagtcctaatgagaagcagatcgctcagatccaagcacagaactgagcccctcatggacacccaagacatgtgcatggggtgggcagatgtcctgtgctctgcactggctgcacaacacagagtctcccatggaaagctgagaccaaggtctggtggagaaacatctgcttcaggctagcagctgtactctggagcgncttcttcagaatgtnaacatataatttacaaaagttaaaaacaggactgtcaaaaaaaaaaa

SEQ ID NO: 3277 - DNA, 112 bp, Homo sapiens
  misc_feature (1)...(112): n = A,T,C or G
tcttgagttttcctcttctctctctgggaaggagggaaaacagncctttgtgagaagcgtgctttcctggaatcaggcgtttaaactcaggttggctagagtttttgttttg

SEQ ID NO: 3278 - DNA, 107 bp, Homo sapiens
  misc_feature (1)...(107): n = A,T,C or G
ctgcgcctgtcctctgaaggtgaagggctataaccacagcttctnangaggacaangcgggagganntccaggacactctggtaaanntagagactctcaaaataaa

SEQ ID NO: 3279 - DNA, 307 bp, Homo sapiens
  misc_feature (1)...(307): n = A,T,C or G
ggatcgtgtatgcatgtnaatgctnaggangacatctacatcttgcanaagggtgangcaactatgggaagtggatactcacatacccagncntcangactgctnagactcacaacagnactgntacttnacacagaccactanagcagctaaactgnngnctnaaagnaagggnactnggtcgtnantctggtgatgcgcctatacacccttcgagaacatatgtgngagtgcgtgtgtgcgcgcacatacacataatcactccacacggacatataaacatttgtacatattttaaaaaaaaaaa

SEQ ID NO: 3280 - DNA, 307 bp, Homo sapiens
  misc_feature (1)...(307): n = A,T,C or G
ttatgatacagcatacacanccatgagcccaggtgaccgncgcnagaagggtgtagcaggtcctcctgcaangagccctttnaggacnctcnccntgnctncgggnacctcnctgagaanctnagcgtanncncaacacgtgntctccctaggataggccnccacattgccttcccantanntnttatgaganctacnagngcgtngaattattacccatacaccatngcagactcacttggctcattattgaagtttnaaattatatctagnctatgatgctgtgggttaacgcgcaaacttattc

SEQ ID NO: 3281 - DNA, 147 bp, Homo sapiens
gactgagactcctcatctgcaacgatctacattatccacagcacgtttctacagacatccctctatgccagaccctcagaataaatggaacctctctgcatgccaatttatttaataataaataagaaagatctgcaaaaaaaaaaa

SEQ ID NO: 3282 - DNA, 264 bp, Homo sapiens
  misc_feature (1)...(264): n = A,T,C or G
tatgggggagaatttgattaactgccgaggagtggacatgcaggggatccgaggcangctgcgaagtctatcacacagctaaagctccgttacgtcttcatgtcacctgcttctctatctccagatagctggtggacgggcagctgcaaacctcacctcaggggcaggagaggctccacgtgttccaagaataactgagtgtttgngcatctgggatatctacattataatagcccatcaataaagattttaaaccaaaaaaaa

SEQ ID NO: 3283 - DNA, 170 bp, Homo sapiens
ccagttatccttgttgaggaccaaatcagagtttctacgaagttgcctatggctgctggagacaggggatcctgttagagagtaaggagcccctggcaaaagcattctgccttttgccttcatgaatgacttcttggacctcatgttgataacctgtctaaaaaaaaaaa

SEQ ID NO: 3284 - DNA, 108 bp, Homo sapiens
  misc_feature (1)...(108): n = A,T,C or G
gactcaattttagactgctggaggcggcagccacagcgactgagatntgttganatgtgcctaaggnnagagtnnnttntcaattggggcttcaaaaaacaagcatca

SEQ ID NO: 3285 - DNA, 120 bp, Homo sapiens
cacagattgcagtcttcctcctgcgtgctgagtgcttgggtcacgggtacgcaccaacacacctggcttcgcttttcatttaccgcttctacatatatttgaagttcacatggaaaaaaa

SEQ ID NO: 3286 - DNA, 331 bp, Homo sapiens
tgaggcctcagacaagacagcgaagtaactccaaatatatagacaaggagatagcaaaccttaagaaggatcttatgcgaagccgaacattctccaagagagagggggaagagcaatgaacagcttatagtccactgttcccagcggaagcacgcatgctgtcgcagtactaacatgcacccctccaggttcccagtgtctcctcgccctctcccgtccatgacctggagaaagttccaatcccgaaacccccatgtgactttgtttgtaacaagggccactagatgggtaactgagggtcaatgaagtcaaatgtccttaaaaaaaaaaa

SEQ ID NO: 3287 - DNA, 152 bp, Homo sapiens
  misc_feature (1)...(152): n = A,T,C or G
atttttgggaactcancctgactgacctgcttggcagcgatgaacagaaaacaanctggaggaggcccaccccanggtttctccgacngagaggacttttnngaggnccgtnacagctgtgaggacccttcanngttaccaggaaaaataaa

SEQ ID NO: 3288 - DNA, 398 bp, Homo sapiens
  misc_feature (1)...(398): n = A,T,C or G
gactgaggtcctaccccaccngaggcanggccggtgtgtgcatnccatcaaagctccanagntganggcagggagancatcctgngctactcangaccctgcatcanaacaaaacaaggacaatgaaagaccactactggngtctcctgagacctcactctgcgatgtgggtcanatggaggtggcgtctgnctctcagacagtggcacaaaaggctcctttgtgcgctagncaatggcgtgggcaggaccagcctaagacggtccttgcttaggagaaagccaaagccaacctccatgtgttcctcaganggtgttggcaccaggaatcccagtcagacctggctgaggtcatcatcacctctgtttgtaacacagaaaacaactccgcagatggca

SEQ ID NO: 3289 - DNA, 230 bp, Homo sapiens
gactgaggttactgtagactgctagtcccggctatcagctaatgcgggggacctggattcagacactgtgcctgatgaatccgttttgagaaaagaactccacgtggttcgtgggcactctcaccttccagcaaatgataagggttcctgtcatgtttgcctcaagacttctccatgtcgtatgaactaaaagggaactgtggcttttgatgggcatttagagagagatg

SEQ ID NO: 3290 - DNA, 288 bp, Homo sapiens
  misc_feature (1)...(288): n = A,T,C or G
ccacccaaagggttcttcacttgnaaaccaagnaagnangnagggnaggganagttccccttcattaaagcccagnacaaaccaaggagcctggtggtggatggattaccttccccaggtaagttggaaaaaggggaaaattttcttttccaggccggccttttccacttgggnaaaaaggctttggccccggggggtgccaaatgggaaanatttaaagtcccccgnttttgggcccccaaaatcaaactnttgggagggggggncttggnaacttggccgggttta

SEQ ID NO: 3291 - DNA, 124 bp, Homo sapiens
  misc_feature (1)...(124): n = A,T,C or G
gactgaggttcttttcgctccccccaggnccttctgaacagcttcaatatcaaaaaaccacaagctactgtttcctaaaaacaaagcctgctaagtctcactgtgatatttaaaaacaaaacaa

SEQ ID NO: 3292 - DNA, 157 bp, Homo sapiens
  misc_feature (1)...(157): n = A,T,C or G
tgcacaacctggggctgnagagatgtgctcagtgantaacagcactgactgcnctttcaaaggtcatgagttcaatccccagaaaccatatggtggcccacaaccatntgtaatgttgatntagatgccctcttctngtnttgtctgaagacagctt

SEQ ID NO: 3293 - DNA, 117 bp, Homo sapiens
  misc_feature (1)...(117): n = A,T,C or G
tgctggagagcttctgatgcangcagcgtcttataactnnncgagctnaatatacacngctctcactggcgctggagangacntcatctttctgacaacaccttgtgtgcttctaga

SEQ ID NO: 3294 - DNA, 122 bp, Homo sapiens
  misc_feature (1)...(122): n = A,T,C or G
tgcttgacagcggtgaggagnaaacaccnctgccaggaggccnacccnangatttctncgacggtcnaggacttgtggaggccgtatcagcttatgaggacccttaagatgttctcggaaaa

SEQ ID NO: 3295 - DNA, 514 bp, Homo sapiens
gtctggggagctcctgcattaagtcagactgagactcgaacttgaacttcaccagagaaccacatccagggtcattctgcacggaccgactggctgtgcgctccgttgccatccctcagctccagggccagagctgctgacagaggagacactggtccccggctctgcctcccactccagggacatgctcggtgcctctcatcttccatggcgtttaccacgggaaatactgaacacatacacaagagcagagtctcattgtgcagccctagtcagactgaaatctgagatctgcccacctctgtcgcagttgttgccaggatggcaggcctgtgtcattgtcaacatggttttgatattgctgtttgctgtaagaggctttaaaaagttaacaatggaagtaagcctccacctccctccatcttacccgccatcctccgaagactctgccgccctaggcctaaactcacaaccttcctacctcagcgtacgggtggaatgctaggatttcagg

SEQ ID NO: 3296 - DNA, 401 bp, Homo sapiens
  misc_feature (1)...(401): n = A,T,C or G
gacgtctggggagctcctgcattaagtcagactgaggtngacagcncctatcgngctgnataggattccagatgctanncangtacnacacannacanntccctgnatgagcttntcatcccancnggaggggaagttgtgagcangatcctgagttcnaggctagcctgngccactgtctcaaagacaacananaaacncaaggntgagatatcagctgagttggnagaacgtttgccttgctcacgtgaagcattgtggaaggaggatcagaagttcagggtcatctttgggctatatagtagnattgnaaactaggaaactagtctgntctacatgagttgctcaataaaacancatatctacccttgttgcgtgtcttagggtttcaaaaaaaaaaa

SEQ ID NO: 3297 - DNA, 496 bp, Homo sapiens
  misc_feature (1)...(496): n = A,T,C or G
gaactgaggttttatgacggcagcatgagaggaaattattcgaccacctcaaatcgcctcatctgaagtactgggttcccttcatttggtttggaaatcttgcaaccaaagcccggaatgaaggcagaatcagagacagcgttgatctacaatcactgatgactgtaagtgtccatggacacgagaaaagggtgctagccagggctcaagagggtgccggctgtaacaggacagaccaaaaagtcttctctgttctccaaggagccaggaagccatcatgaaaccccagagtgtgcagggcatgaaggcgcaggactccctcaggctccttggaagtatttgctgtctgcacagcacgctcttccagaggctgatgggaaaagtgttaagtcagcattgccaaagactccgaagagacacgttgcccacgggcatttgctagcccttgcttatgaattctagaatanaaatcctctttttctttctttaaaaaaaa

SEQ ID NO: 3298 - DNA, 101 bp, Homo sapiens
  misc_feature (1)...(101): n = A,T,C or G
gtagccaaaacccggagnnacccacaganagatngcaagagagacggtcnngacaaggaaggcccncgcangcgnccacccncctgaggcggcaggccaac

SEQ ID NO: 3299 - DNA, 141 bp, Homo sapiens
  misc_feature (1)...(141): n = A,T,C or G
cctgagttagggggagctaaagtagtaaaaaaaaagnttgagctcgagtcctcnncactctgntcactggctcctcgtcactntgccatggcatnnggnaggtccagncctngtnactctgctcactgggaaaaaaaaaaa

SEQ ID NO: 3300 - DNA, 278 bp, Homo sapiens
gacgtctggggagctcctgcattaagtcagactgaggatttctgcctgtgttaggtttgatgttccgtattgaattctccgtctctcatgtgagcctgtcatcgttcatatttggcaatatttgaacatcagtggtatccgccttgaacttccgttatttctccgaagcagaacaccgagataattccttcttgaatacaaaggtatcagaaatatgttcatagcattgccaaatgaggtcggtatattaaagaagttacactggaaacataaaaaaa

SEQ ID NO: 3301 - DNA, 103 bp, Homo sapiens
  misc_feature (1)...(103): n = A,T,C or G
ggaaactggaaaagctgctcgnagtngtgaacgctcggcanttcctgtgcaaacaggagatggtagggcnaagcaggcancctttatgatacgttgttgagga

SEQ ID NO: 3302 - DNA, 390 bp, Homo sapiens
  misc_feature (1)...(390): n = A,T,C or G
ggcccacccaaacccaaacccaggnaaggccaattttaaggccgggccgggggggcccccctttttaaggtttaaaaaagggnagggaaaaaagggaaggnaaaattttcctttccggnaaaggaaaattttaccttaccccggaaaaagggatggccaattttaccaggaaaaggaaggttagaaggaaaacctgggaatttttttggaggaaatanccctttttcntttcgcttttaaagggttnaaaatanccctttggaaaaagggaaaactttgggannngaaatttgggaancccccctcggtttaacccaaggggatttttttttttnnttgggcanttnggaaaaaaaagnccnggnnttttttttggggggttcccccccc

SEQ ID NO: 3303 - DNA, 119 bp, Homo sapiens
  misc_feature (1)...(119): n = A,T,C or G
ctgattttgtgagtagaaatcgagancctgccatcnnccccactggnngttaccatnncaacagctacttgcagctggagaggatnantgtntactactatgaagctgctgctaaggga

SEQ ID NO: 3304 - DNA, 328 bp, Homo sapiens
  misc_feature (1)...(328): n = A,T,C or G
gactgagatgacagggatggcctgcgggcgaggacagccaggaccgaaccgcgagggaggcacaattgcagccctgtggcgccacctacggcccagactaactcgcangctttctgccaggccggctcgatacaacttctgacatgtggattccagggcctcctggtggccattcaagggtcctacacactcaacctcanagcangctggccagagaacagcanggatctgagggccgtcgatgtggcccagggattgctcagcttccggngacggcccagccaggaganggccctggttcctattctcttcctttatgctaataaaa

SEQ ID NO: 3305 - DNA, 498 bp, Homo sapiens
tgaggagcctgtccagcatgtgattatctgtatcagcaccatcttgtctactggaccacggagagaccctggggcaccttcagctcatctctagatcctagctggcaccgcagcacctggcttggatgaggcaatgggtgtcaggagccatcaacagtgcctgcagctaacacagaagagcctactgtgcaccaggctctgtgtcgacacgtcacctcagcattcctactaattcttggagggcactacctacattttactctagagggaacagggacacaacaaagaaacttgcaaaggtcataagagaattaagagataattcaaactctggaagttttcctccatattcttcatttcagacaatagtggtggggttcagaacatgctaccccaaaacacatacgtcaccttagcatgtgaggaaattagagaagcaggaagactttctgatccccactcgccttgcttgcagaattctccatctcttctctaaag

SEQ ID NO: 3306 - DNA, 269 bp, Homo sapiens
  misc_feature (1)...(269): n = A,T,C or G
gactgagaactagctagaagagtactgaatgtgacaagaagaaattgaagatggagacatagaaacactcaggatgagacacccctcccaaaagactcctgggagctttggccaaggcaacggggacagacatccttcctccaggaggccacaactactaaacctacccaaaaaggaccagcaactgaggaccatctgagccttgggagggagcactcacattcaantcaccacgcccacttacccaggttcccaccaacagaagttac

SEQ ID NO: 3307 - DNA, 188 bp, Homo sapiens
  misc_feature (1)...(188): n = A,T,C or G
tgagctaagagaagtctgcttgagaggctctgctccatattgnacttctgggtttgtgtttggagatcccgaagggaaagtaagcaacaacaacagaaaagcctcagcaaacggtctctccagaaggcctttcatctctcatctccacagactgtacccaactggacagagtcacagtgaaatatagt

SEQ ID NO: 3308 - DNA, 146 bp, Homo sapiens
  misc_feature (1)...(146): n = A,T,C or G
gcaaggctacagcagagcgccctcctgnatgtgctnaacaaggctcagcncacacatntgcattangctgtnatgctatgangaantgcttctttttaggtctcntantanctttgcttatggtacatacccaaagattgtcttgg

SEQ ID NO: 3309 - DNA, 288 bp, Homo sapiens
  misc_feature (1)...(288): n = A,T,C or G
gactgagatgcaatctgacngctgcctcacactcgggccaccatgaccttcccacggtgatggacgacgccttcaaacttagaaatgaaacaaagcaggaggagcgaggagaggacgcagcaggcgatttccgggcatgaaaacttgagagcctctcactctacaacctatgctttatagcaccaagtacaagtattttggaaattttggtttgggagcctagggtttagaatactaaattgatgttttctttggaaacatcaggtagtcaacttctaaaaaaaaaaa

SEQ ID NO: 3310 - DNA, 489 bp, Homo sapiens
  misc_feature (1)...(489): n = A,T,C or G
tgagctctcccaaaggatgcantgcatgcacctcagtattctgtctaccaagaaccagggttataagactacggtatatcagtgcaaggaaaagctaccgttccatgaagaaagacactgtgcaatgatctgttgttacctgtgactccacagtccctctccctctgccagaactattttacccgctaaaccaggggtgtatctttggactctttgccatcaaacatcattcttcttcccaaaggaattttaaatacttcttttcaagcacagaggagccagcttttcaccccctgcctctgaaagaacctacagagatcacaaagatatatttgacccggctcagatgctccaagaatacagttcacaagaccatcccacttcattaccacagagggaagagcctaagaatctgatcccttcggcaccatgcaagtgattgtttttaagatgcatttggccagggctacncagagaaaccctgtctca

SEQ ID NO: 3311 - DNA, 114 bp, Homo sapiens
  misc_feature (1)...(114): n = A,T,C or G
gcctgcactgacctggaactgctgatgncccncttntccnggctgaaaggangagggtcaggnggnnaccggccttggccacatttacacactgacagaaagtccacccccagg

SEQ ID NO: 3312 - DNA, 270 bp, Homo sapiens
  misc_feature (1)...(270): n = A,T,C or G
ggaaggcataaatgcccgtcctgtgctttcctgtggtttcccccggnatccatccgatgaggcttcagcccccaccacctgctcagnatcctctnnttcctttccggcgaactctgcaacttgaagctctcctgctttgtacttacatcctctggcatgctgtcccccaccccacccncaccccgtccgtggtctnaacttagccagaatgacatcatggtgcctacacctttaagattatataaatctgtgatcccgcaaaaaaaaaaa

SEQ ID NO: 3313 - DNA, 319 bp, Homo sapiens
  misc_feature (1)...(319): n = A,T,C or G
cggagggagcccctgctgccacctaatnnctgctcctctgcttntcccctgctcccgttccttttntctananaagactttcaaggcgacntttgcatgtntgaagntctactttngctganaagaaaacaggttntcctttnctgcctcttagttcanttnatggttnnagtgatcctacccctacatgagatgnttagangatggaaancgngtctntngccaaacttgaccaccctcccagtttngggttctcctaaaaanactacaanagaaaangatttaggactgagaanccncttgacaaaaataacacccg

SEQ ID NO: 3314 - DNA, 108 bp, Homo sapiens
  misc_feature (1)...(108): n = A,T,C or G
cgcccatctcggaggcagaacanagaatnatttgcttcggnatgtatntactgcctnnaatcgntgagttcgagctcngtacccggggatcgaagtaaagaaaaaaaa

SEQ ID NO: 3315 - DNA, 154 bp, Homo sapiens
  misc_feature (1)...(154): n = A,T,C or G
gactgagcctggtcacttgtaccacgaggcccatagaagaagtccgtcgtccttaccgnccccccccntccccatnttnntaanggaanaggaaagatcctgccngggcnggaggccacggntaggatnctgatcgangagggcccgagtttgg

SEQ ID NO: 3316 - DNA, 209 bp, Homo sapiens
  misc_feature (1)...(209): n = A,T,C or G
ttaaccaaaacccctnccttaggaaaactatttccttggcatgaccttacccctttgggngggcttttgccaccggggnatncccttcctntnttggggcccttttttggggcnaaccttaatttccaggagnaaggaaggaaagccnccatgggcacccgtagggggccttcntgggcttggttgccttgcataacccaggggcttgg

SEQ ID NO: 3317 - DNA, 199 bp, Homo sapiens
ttcccctcccatctccagccactcagtgcagcagccccactcttgcctggtcccggactcggggaagctccgctgagaggaccctgcactctgctgcccactaggctcctggcaccttccgtagccagtgtctgcatccacccggatccttgctgggcagcgcccctgggacgggaggatacagtaagcatctcagata

SEQ ID NO: 3318 - DNA, 391 bp, Homo sapiens
  misc_feature (1)...(391): n = A,T,C or G
aacgagtgcaacccattggccgnngccttgtaccaaaaagagcctgagcaatgcagccctgaagctccnaagctttgcaagacattgagagcatgacacggtatgngnagagaggncatgctgactacacctgatggaatncactgctactcctttccgtcagctgcttgctaagtcaagtcacgtnnggngatcccagaaatgccgcanaacctganacctttgngcnaangagngatgaacttntgccttgctgagctcactgnntgaactgctganccactgncccgatgcacctntgagaagtntaagatanggtctgagaggngtcncttccagcntgtgcagaattgangncaccagaggaccgatttagcccagccatccagag

SEQ ID NO: 3319 - DNA, 169 bp, Homo sapiens
  misc_feature (1)...(169): n = A,T,C or G
cctccggtgtgcatcagggtatgcancggtgttgtaagcaggatncgcccacccctcccctctaaggcagggncatcgncccttnccctccnatctncagccactcaggngcagcaagcncaactcttgnctggncccnggactnggggaagctcccgctgagaggacc

SEQ ID NO: 3320 - DNA, 207 bp, Homo sapiens
tgagtgttggggattggatccagggtcttgtattcaaggaaagcattctcaaattgatctaccctccacagcctgattgcgaagaacactatcaagccattggctacctgtaactactattcttatgccataacaggagtataaaaatacatcctaatgttaaacaataagcatccctcaagaatttagttaacacagaaaaaaaaa

SEQ ID NO: 3321 - DNA, 350 bp, Homo sapiens
  misc_feature (1)...(350): n = A,T,C or G
actgaggcagacatatccctcaaaggacatctgagctgccaaacgtggagaagccaatctgaacttgagtgtgcatgcagtcattactcttgatgcattgcacttgaactgcgagctcaaaatataaaacaagcgggggcttgagagatggctacatncttttaagagcaatgaccattctcctaggagccttctggggtttgattcctaccacccacagaagacttacaancctntggnacagangaccttggcctncaggacnctacagccaatgatgctgagaccttttccgcaaatgcaaataaatggaaattttaaaaccaaccaaccngccaacaaaaaacaaa

SEQ ID NO: 3322 - DNA, 299 bp, Homo sapiens
  misc_feature (1)...(299): n = A,T,C or G
actgaggtggggtcacctgagtatcagtgtctcagctaaaaaggtgaagacgatatcaaggtgtccagaaaacagaatgaggtgtccaggtatagtcagaaaaggctgccgtggactctgtcagccactctgtggggcacacgaggatgtcaggtgtgaaatgtggtcaggagcagtgttcagaccccagcatgagtaccaggcaaaccgctggacacagcctatatgancaacagccagcctttctgagagaggggacatgtgttctgcatttcactctgcagtggagtgtcggagtg

SEQ ID NO: 3323 - DNA, 267 bp, Homo sapiens
  misc_feature (1)...(267): n = A,T,C or G
gactgagctactctccactctgaatcctggtgagattcttttccacggtggatggcaaggtctctgggcgcatgaaagcatcctacctgcccaggttctgaaggagactccgtagtgccagcaatactgaactgaatgccctaatgccagctacagatctctacatataactaccttttaatttgtgtttatccttgcgtgtggggttttttgcctgcatgtatgtntgtgtttaagataaacatttgtttttgccaaaaaaaaaaa

SEQ ID NO: 3324 - DNA, 489 bp, Homo sapiens
  misc_feature (1)...(489): n = A,T,C or G
gactgaggcagccgaggcttttgtcctgacaagcaactaggatacagtcgtggttttcttgcctggaatatgagtgactatgaagacatcgagcagagaaactctaaacgggcgattctggttaaacagagtaagttaataaggagcaacctgccctccaggctgcccaagctgcagaaaaagaagaacaggnatnttngnnntcatgnnnaattntttnnggggaanganaganagtgntagnccnggagcnnatcctgaaacccctgncacnnnnnncntgcntggcatgntcacnnanagancccttnntnantngtagaagagtcctcagaactcactcgcacagaacttaccatgcatccaagatggcgatcttgcccaggacttaccatgctttgcctgcttgctcancagccattactgncatccctttgaagcagnctgtgagggagctgaatttgncctcctgggaaggtcctgccccca

SEQ ID NO: 3325 - DNA, 285 bp, Homo sapiens
  misc_feature (1)...(285): n = A,T,C or G
ccgagtgtccgtgagactctgttccaggcagggatgaggagtacagaaaatggcatttggtgtcctcgttaagaagtttaagagttctgggattatgggggngctccaccatgcctgnctgtcancccagttcctaaaacttgnctggcctgancggaagnctttgcagangtnngnaancgtntgtctagctacctgaaaaccaanantcncattcagatgtcgtactcanagcaccgcgccatttccaagtggctgaaataaaatgtaagttgagtgtcaaaa

SEQ ID NO: 3326 - DNA, 103 bp, Homo sapiens
  misc_feature (1)...(103): n = A,T,C or G
tcagtatcaactatgaattggnatncaaaacaagagaatgngncccanacccccnccatattctaaaacccagtcntctatcttgcacgcattttttaatgac

SEQ ID NO: 3327 - DNA, 510 bp, Homo sapiens
  misc_feature (1)...(510): n = A,T,C or G
gaactgaggcctatggctagcagctgcctggagccttgggcctggcttccgtgtcagctctaatgagctggcagccaagaagaggagtctgctgtttgggactggaatccaccttccagaaggttcctgcgtaattgacaagaagctcaggcacaggcaaagaggaagccctgccctgactgccacaggggagaagaaagacagaaggaagtatccaggctttctgcagatgttcaagttcccagctagctcctctctccggctgcatttgaagctgggcaggaagaaagacaacttgcttccgccctgtgactctgcccactgccagaggggacccatgcgtgcccaggcctctgctcaatcccttctctcttcttccttctcttctttggaacgaagcaagaatgaagggtggggcagatggatggatgggcggacctgaacccgaaggcctcttcagctgtcttgggaattattttccggggacantnagggatcaggaggactatt

SEQ ID NO: 3328 - DNA, 113 bp, Homo sapiens
  misc_feature (1)...(113): n = A,T,C or G
accccccccctattcaggganaaacccaccactggacanangaaggggaganggaattgcccnggggagcggaaccccattcaccncaggaccaccgcacccggcaagaaaac

SEQ ID NO: 3329 - DNA, 169 bp, Homo sapiens
  misc_feature (1)...(169): n = A,T,C or G
tgccctctgcctgcactgncctgngacnctgctgagccccccttcatcctggcgtgatgggggaggaggnacaggtggncccnggccttgggncacctttcaccctgacngaaagtcccnccccnggtgttnngtgangacagatgacccgtgtgacttctcctcaggg

SEQ ID NO: 3330 - DNA, 101 bp, Homo sapiens
  misc_feature (1)...(101): n = A,T,C or G
tctgagcagctgcctcttgtccctgccgttgngacttcccatcatgacggactgcaccctgcaactgtangccactaataaacccttccttcctgaaaaaa

SEQ ID NO: 3331 - DNA, 129 bp, Homo sapiens
  misc_feature (1)...(129): n = A,T,C or G
tgcgttctgttctaggagcacgaggcntnttanaagcctcatccagattcangnaagaggctggtgaaacttccgacatctgntttggaaattgatgaatntnnactcggccacatgatcaaaaaaaaa

SEQ ID NO: 3332 - DNA, 114 bp, Homo sapiens
  misc_feature (1)...(114): n = A,T,C or G
acgcaccatcccaccancagtnctcctngaaacacaacgcacccctncccaagaagtcctactccaagnatggatangnaggggctacagnatgtatgaggactaccaaaatga

SEQ ID NO: 3333 - DNA, 136 bp, Homo sapiens
  misc_feature (1)...(136): n = A,T,C or G
agggtcggggaagtagantaatgttttcctcgaagggaaccccnccaacaacaancgattgggtttttcngggcttttnagaaannngnttaacaggcccctcgnaaatttgncctttnaaccaaccccgaccccc

SEQ ID NO: 3334 - DNA, 160 bp, Homo sapiens
  misc_feature (1)...(160): n = A,T,C or G
taccactttgcatgcctgncgctcanggaagccaaagaggacctgcctcntttttggttntgacacagnccggctctgcaggangggcagctggcacctangtggnnggcaagaaaanctnaggntcatnnnccccatctctgacccataactggagctg

SEQ ID NO: 3335 - DNA, 113 bp, Homo sapiens
  misc_feature (1)...(113): n = A,T,C or G
gactgaggcaagacagatctagaggacatcttaaagnggacctcattgattgaggaatgctgaccctcggatgctctncacccccaccgnatgctgcagctcaatatggccga

SEQ ID NO: 3336 - DNA, 449 bp, Homo sapiens
  misc_feature (1)...(449): n = A,T,C or G
gactgaggaagagttcggacacagtggaggggattgcagcgggagagccagactgactagtgagatgtgagatctctgtgtttgagatccttggactgtaggccaacagcatcctgagcacagagtggctgctttgatgacctgcaccttatggcaaggccaacaagaggatcacccacatcctggagattctgatggatgcttaaatgatacttcaatgaagagcactnanagantgnatnctnncancaaccatgttnagnnaggntggggatannctnctagccttcngaananaccctanntcctgntntgcgggctgngagatanccngagngncttccgaatggaaccntgcccngacttgnagaccntgtgagaacaacngtgctttccgttgcagccntgnactgantttgctgacaatgaagataagaacttgctctcaa

SEQ ID NO: 3337 - DNA, 463 bp, Homo sapiens
  misc_feature (1)...(463): n = A,T,C or G
aggaaccctcagagacttanaggcggaangtgaatgaggtctgagactgaagttctgtctcaacagtaactaattctttgnaaactgtggaatttgcagattctgcgctacgcaacagtcttcgatgagcagcgtcacacatacagggtctcccacagtactgtctatggcttctgcacactgccagttgccctagcattctagactcagacacanttttactcagngtcctcctccagagggcaggtgactgcactcacttcctcttcatgtgctcggtcagcatccttggattcaaaaggctctttcagctcggggcttccgtgaagggcgccaatcnctctcagtagttttacgcacaaaagctagaaacactggaaagtcaaataccaaaaanctaacatganaattatatcaacactggncagaggcngatatataacactagttatatatgataagg

SEQ ID NO: 3338 - DNA, 158 bp, Homo sapiens
  misc_feature (1)...(158): n = A,T,C or G
gtggggtctttcacacgttacacgacgggtccagcgagttaccactgggnnggaaaccccctggagnaaacccnttttcccccagggnaaaggttttacnnccttggcaggaaaggggggcaaacttactttttttnaanaacggggaaaaaaaaaaa

SEQ ID NO: 3339 - DNA, 233 bp, Homo sapiens
  misc_feature (1)...(233): n = A,T,C or G
cgatgacagctttggatcggagagcaactgataagactactgacatcatgaacgaggcatcaggggcaggctggttgtattaatgataaagagtcccatgaagaatggaaatataagatgctgagtcagatgtgggtcagcaagaatactgctttttaaaaaaaaatttaaaacatactaanaaaatatctaaactttatgcaaatntnttactttacctctaaaaaaaaaaa

SEQ ID NO: 3340 - DNA, 123 bp, Homo sapiens
  misc_feature (1)...(123): n = A,T,C or G
gtggaagacagagaagcgtgcaagaatcggncctctcctttgaccntgnggatnntanggaccaaactcaggtattcatgcttggcagcnaggtgcctnnacgcactgagccattacacgact

SEQ ID NO: 3341 - DNA, 158 bp, Homo sapiens
  misc_feature (1)...(158): n = A,T,C or G
aagggggaaactttctggngaaaagggttgcggccaccngggggaaaggccattggggnttggggtttttcccattaattattcctanaccttggcccctcnggaaanaccggantgtaaattttcggaaggctttccggggtaaaccccccgggggg

SEQ ID NO: 3342 - DNA, 122 bp, Homo sapiens
  misc_feature (1)...(122): n = A,T,C or G
ccttgaagggtaacagcaccctgangtcgtacttatcagcacacactctcatncttgtnanggaccttctcccagngnccagtgangaacaaagatagaattcttcttgaaatttcacatca

SEQ ID NO: 3343 - DNA, 121 bp, Homo sapiens
  misc_feature (1)...(121): n = A,T,C or G
ctgaggtgtatttatcagcacacactctcattcttgatanggaccttctcccagngtccagtgangaacaaagntngaantcttcttganatttcacatcaaggtctcagttctgacttag

SEQ ID NO: 3344 - DNA, 411 bp, Homo sapiens
  misc_feature (1)...(411): n = A,T,C or G
tccacctggggtgtactgccttgaaangacttcctagtccnnctcatgcttccagctngccactgngccacagcactnagcgcaggagctccgtgggggatctttaaatacaaaccntaacactagnnattttatttctcaaataaaatannggtgtatttcantcaganaganntgatntggtaggnccaagactttgggnaganggacatattttccccccagagaatacgaanttatcatgattgagtgggtntagtacttgctaatttaatnatgncttgntgtgagtataatgttaatggcaaanaaatacngnggaattanaangctctggnatatgattntagttatntatcatcatactgnttaaatgaaataaagnaagntgctttaagttaaaaaaaaaaa

SEQ ID NO: 3345 - DNA, 105 bp, Homo sapiens
  misc_feature (1)...(105): n = A,T,C or G
ccaaggaccaaatgggggcttaccaccatacntantganaacngtctncctnttctgganggggctgaaganagctacnggggcttacatataataaattaataa

SEQ ID NO: 3346 - DNA, 115 bp, Homo sapiens
  misc_feature (1)...(115): n = A,T,C or G
ccttgaagggaacagaccctgnagtcgaacttatnagcacncactntcatccttganatggaccttctcccngaggccagggangacaaagatanaantcttcttgaaattacac

SEQ ID NO: 3347 - DNA, 107 bp, Homo sapiens
  misc_feature (1)...(107): n = A,T,C or G
aggccatactctacttcntgtggagctntcaacgntcggacnggaagcaaggctgnttccatatatactactgcctcnaaatcgacgaatcacgagctcggcacccg

SEQ ID NO: 3348 - DNA, 324 bp, Homo sapiens
  misc_feature (1)...(324): n = A,T,C or G
cttctttaggaaacgacaggccaggatttctggagagagctgctgtgaagcccggtccacatgcccacctacgctttccattgctgaagtcaacacattcagttccaagcacancagttgtcaattccgccaggtccctctgaaggctgtttgtgatnggcgtatggagagcatactctgaaaactggtcagccgagggctcacctgaggttgntttttgngncacagggtatctgacctccagcttcttcagtgactaangagacccttctttcttctncnctctcttcatctaatactctctttnctgtctcaccgaggagg

SEQ ID NO: 3349 - DNA, 193 bp, Homo sapiens
  misc_feature (1)...(193): n = A,T,C or G
cctcaggacaggtataaggcagcntgggttatcttctttgagctgggcctggggacactgctcccctgnaatttttttatgaccgcanccaannntttcacanaccgtctgnacntggaccagaatgagtcctnggacactgatcaatcatgcgaangcaccaaggccttggttgaccccacagaggccttgc

SEQ ID NO: 3350 - DNA, 333 bp, Homo sapiens
  misc_feature (1)...(333): n = A,T,C or G
ttctggcactgccgttgtgaacaagagcctataattaatgcttacacatgagccnagatgggaatcacnngncttcaggttaaacaggnacccagtanatagcatcccttntacttttcctgccatggggacttttaccatttcanacagctggacgtggatacgcatgcctttaatccccagcactccagaggcagaaggataaatctctatggatcaaatgccatccagagttatatgatgagaccctgtctcaaacaaacaaaatcagctntatgtatacacagtgcattctaatcactgttatacccagcttctctatttccctcccaa

SEQ ID NO: 3351 - DNA, 536 bp, Homo sapiens
  misc_feature (1)...(536): n = A,T,C or G
ctttgagattccatttacttatctgaagnggaagcgtgaaaatgagcagccgaaggaaacgtgctcccccgatgaaggtcgatgaagaaaggcaacagcagcttcactggaacatgcatgaggacctgaggagtgagccgctcaccatgacggtcggggaacaggcctgttcagatgcagactcttcttctgattgcatcatcatcgatgaaggccctcctgagagtgcacttcacagagataagaagaggcgttcagagactgtgagcgtcttagaggccaccgaggaagagacccgtttgtctgtgactttgaatgttaccagtttctccctatcgtgtgggataattcttgnaaagcattttctgggagattttgcttcttcancttctccccaaanagagtttagttgaacattttttntgaaaggacttttacatttgagncctttcagagtcaagcagncagttcctgatctatgtncattcananttgtaaaatgtngnagaancaagaaaatgttttttgaaggatcc

SEQ ID NO: 3352 - DNA, 102 bp, Homo sapiens
  misc_feature (1)...(102): n = A,T,C or G
gacttcttttcctaccctctttagatgtgtggntgctgagnttggnacctgngaccatntagaaggctnttcccctcacaccgtntgggggatagctggctg

SEQ ID NO: 3353 - DNA, 166 bp, Homo sapiens
  misc_feature (1)...(166): n = A,T,C or G
atcctgaagtctcccaanattgctgtantantcttagcaactnncantcctaacctgntnaattatagatnatnaaactgagccacattatggatttcaaattttgttggaccaccagaggaagtaagttntttcctaaaaaaagattttaaaagttttcaaaaag

SEQ ID NO: 3354 - DNA, 249 bp, Homo sapiens
  misc_feature (1)...(249): n = A,T,C or G
ccctaaacctcctgattagatcagaaacnacaagccacntcctgctttattggagactcatctttnctgaggnncatcattncntccgattttcactactataaggaaaggatgaaaaccnttnttttgctttnggnccctatgtcctccatcagccaantgaccatccnntttatcatccatacaaagacnnttttgcactattaancaccatgcgaggacaacaggatgtaaaactgagactatccc

SEQ ID NO: 3355 - DNA, 200 bp, Homo sapiens
  misc_feature (1)...(200): n = A,T,C or G
aggatcctgcgacagcttgctctatatccatagaggtgaaccagagacaaacctttcagttggccatggacttgntgaagcncaganncctgactttggccgctgagggcnaggctgacttngatntntantatcggtgctttgggagaggcgntaatttttanaactcatttgnggtttttctttcttttctataaagg

SEQ ID NO: 3356 - DNA, 440 bp, Homo sapiens
  misc_feature (1)...(440): n = A,T,C or G
gactgaggtacatgtgacaacgccgcagctatgagtggaattttaaagaggaagttcgaagatgtggacgcctcctcaccatgctcctctgctcgggaatcggatgatgaagtctccagcagcgaaagtgctgacagcggggatagcagtnaatccatccacctcaaatcacttcaccccttcctccatcctgaaaagggagaaacgggctgaggacnaanaatgtacacttcagctgtgncaccgngtactacttcaccaggaggcagggcttcactagtgngcccagccagggnggcagcactctggggatgtccagtcgtnacaacagcgngcgccagtacaccctgggcgagtttgcgcgagagcaggagcgcctgcaccggnagatgctgagagaacacctccgggaggagaaactcaactctctcaaactaaag

SEQ ID NO: 3357 - DNA, 119 bp, Homo sapiens
  misc_feature (1)...(119): n = A,T,C or G
ttttcctggtgggcanccgccttctgtacctagcnttacagaactttgggaacaagggaagaaccatgacttantgagagagaagccactggtgggtcnctgttccctcccttacgcta

SEQ ID NO: 3358 - DNA, 477 bp, Homo sapiens
  misc_feature (1)...(477): n = A,T,C or G
gactgagcctcctggttgcctggcacagcaagcagagtgggctttccggtacatacgtgagagggtcctgccgcttaccctcttccatgacctgtggcttccccaggctctggttagattctatcttggctcacagaaccccgtgtgcactgatctccttgtgtttccaaaattgatgggttactatctctctgccctcttcctgatcctgtgaacctagcattgtacttccttccctggggccttcgctgttccctgtttcaagacgagcacctggcaagttcagctggagactctgactaaacactgctcctcagactgtcttcttagtgtggtccanattccaaggcatctctgtcaccaattacccaatctcacctagcctcgaatggattaccttactccattgtaagcttctgttcttattgtctcctcttcctccaattatgctgtaggtngttacttcaaaaaaaaaaa

SEQ ID NO: 3359 - DNA, 131 bp, Homo sapiens
  misc_feature (1)...(131): n = A,T,C or G
ggagaactgtgttctgggaccaaaccangagaagagcctgagtgtgcagaacagggtccaggacttccagggagccagcctgcttgtctgcgccagggaggtcatcgccagcaacctctcccggctggaga

SEQ ID NO: 3360 - DNA, 147 bp, Homo sapiens
  misc_feature (1)...(147): n = A,T,C or G
taggagagaaacagtggaccctctggggatcaagaggangcancagccccagcttttccagtttgactgtgattncccatttttgacctctttgatcgtggtttccctatgcacccgcncggagccttngcatagggctttttcccc

SEQ ID NO: 3361 - DNA, 200 bp, Homo sapiens
  misc_feature (1)...(200): n = A,T,C or G
gtgaggctgctgagcttcnacaatgaagtggagctggccaaggtngnccaagagccnccctangtgccaanatggttctgtgcattgctacccaggactcccactctntgaannacctgancctgaggttnggggcgtccctnaaatcctncaaacatctgctcgagaacgccaagaatanccacgtggaggtggtggat

SEQ ID NO: 3362 - DNA, 337 bp, Homo sapiens
  misc_feature (1)...(337): n = A,T,C or G
gactgaggatggacaatgctgaggcctgtttcattttgagtagccgctgcgaagtggatagaacctcatctgatcnccatacaatcttnnnngcntggnctgtnantgattntgncccanattgtnctttgtttggtcncgatattacaacccgaaaacaaattccanataaaaatttgcnaggnaagttttgctcttcantgacagcctttgaattcctctaataattttcagttttgtttngttttgttttacatttgagaagttagtggcacttcacttattcatngntntatagaacagacagaattctcttttaagcatctttttaaaatac

SEQ ID NO: 3363 - DNA, 121 bp, Homo sapiens
  misc_feature (1)...(121): n = A,T,C or G
gtatggacacctactgtaacctnactnntataggctacaagatgggacnaccctnatatgagaananccatgnncnagttgtcgaagacctacangggaacctttattatcgttcaagcta

SEQ ID NO: 3364 - DNA, 114 bp, Homo sapiens
  misc_feature (1)...(114): n = A,T,C or G
atcggaatatggacatcngggaattgatcactgtttctcattggctgattagatgcactttctgtccctccctctgtcctcagtgacatgcagggtgtttttgaagggacggcc

SEQ ID NO: 3365 - DNA, 338 bp, Homo sapiens
  misc_feature (1)...(338): n = A,T,C or G
actgaggtggttgtgagcnctatgtggttgccgggattgaactcaggacctctggaagagcagcggtgggttgacttcccaacgattcattgtacatccaggattgtaaatgaagatttcaaaggagaaaataaaattaaggtctatgtagagagatgcaatttgatgcaggtaataggattgctcagctgtttttatatccctacatcaaaggcaaagccactccagtagaaatagcaggtgaggtcacctgaaaaccttgtcactgacctgaaaaacgcctattccattgaaaatgtctctgtttataatttccacccagcataataaatggctta

SEQ ID NO: 3366 - DNA, 115 bp, Homo sapiens
acgcacatgccgtccctgctccccagacacaacagaaccaacaattaatcgagtgtccggaactcctggagtcatcatgagatcatgacatcacctcacccacaggtactttgat

SEQ ID NO: 3367 - DNA, 149 bp, Homo sapiens
  misc_feature (1)...(149): n = A,T,C or G
cctgccaagaaccctccaggcagnnggattgtnacaggatgcgagagtgtggaggcctntgcaacagcggaaacggctnntcaccgnagccatctttgtgtcacctgagccgggagatcttattnattangntcattaattgcgcaatg

SEQ ID NO: 3368 - DNA, 277 bp, Homo sapiens
  misc_feature (1)...(277): n = A,T,C or G
agatagcttacagccagcctagggagcagagcacagntctttgatgatgccggcaagagaagttaggaccatatacagctttaaaaaaccaaccaaccaaccaaccaaccaaccaaccaaccaacctggatttcaccaagagcctatatggaaaaggatgcttccacagagcttacaggtaggggcccaggntnggcaatttcttgactcntggacacagagcctagttaagccggcctagacttctgacttgtggaattataacttacttaataaa

SEQ ID NO: 3369 - DNA, 109 bp, Homo sapiens
  misc_feature (1)...(109): n = A,T,C or G
acccatgatcacaggtgcctactgatgcttgnaagataatggngnancccttggagctgagnnttttatacacagtngtgatgggaaccaanctgacagtaactgctga

SEQ ID NO: 3370 - DNA, 149 bp, Homo sapiens
  misc_feature (1)...(149): n = A,T,C or G
tgaactggattggctaggttgatcggnccnccnataggtgcttnggtcaacacattgaatacttacttggctccatncntannnagnnctgtgggctatgacngaccacctttacatggaaanagantatctctgacaaaggaggatgc

SEQ ID NO: 3371 - DNA, 131 bp, Homo sapiens
  misc_feature (1)...(131): n = A,T,C or G
ggcatcatcccactgctgaangacgtttttttttttnttggaaanacatgacanacancccacaaccctnatgaaggagtttgagccacaggacccccggcctcagactcanaaactatagtgaggtatgg

SEQ ID NO: 3372 - DNA, 195 bp, Homo sapiens
  misc_feature (1)...(195): n = A,T,C or G
tttttgattgactatcagnagaggnagaggggctgnccttntggntntgggatgattgtgnggnncccccttgcgcgggccacctgatngannnctngggctctaacaggcaaaanggaggctctaccaccaaaccgagggcacagngngaccngctgcctcaagcagctatnacatcccagccctgagggactg

SEQ ID NO: 3373 - DNA, 114 bp, Homo sapiens
  misc_feature (1)...(114): n = A,T,C or G
gactgaggcctgattaacacttttaaaattgtgttaatnagtgaattaagcntgncccanatagtgagngcctgtgcantcagaacacagtganaccgtgcctaaaaaaaaaaa

SEQ ID NO: 3374 - DNA, 315 bp, Homo sapiens
  misc_feature (1)...(315): n = A,T,C or G
ctctccctatggcccggngtccacggagnagcagggcatggcatttcgtcctgagcgcagcccgccnagatacagatgcccgggctgtggctctggcnggcagntntaactggggctatnactctgangggcancacagcgactccnactctgaccctgantactcctccctgccaccatccatccccagtgctgngcctgtgacaggagagtccttctgtgactgcgagggccagaatgaggctaccttctgcaacagtctgcacacagcacaccgtggcaaggactgccggtgtggtgaggaagatgaggatt

SEQ ID NO: 3375 - DNA, 111 bp, Homo sapiens
  misc_feature (1)...(111): n = A,T,C or G
gaaacgtcctatacgcttggtgttgaaagccctaatccaaaacgggaactngttgnaaatctttatagtcttgctggggngagatgtaaagggctagagaggttggcccag

SEQ ID NO: 3376 - DNA, 116 bp, Homo sapiens
  misc_feature (1)...(116): n = A,T,C or G
gactgagcagactccatntngagaatagatgactcctncgaaagaangtcctaccagctaccaaaagacnnnngacctcagccggntttnaaaaanctcctactacttgctgttgt

SEQ ID NO: 3377 - DNA, 255 bp, Homo sapiens
  misc_feature (1)...(255): n = A,T,C or G
ctgcagaatggacccctgtttgtganggacnncnttancatccgatgggncgcccaaacaggcttcgtggagaacatnaacagcatccttanagagtacaagcaggagccnnggattactgccantnaagatctgnatccttggtcctcctgctgtgggaaaatccagcatctctgaagagctggccaagtactacaaactgcatcacatcangatgaaggatgtgattgctgaagccatagccaaactggaggc

SEQ ID NO: 3378 - DNA, 373 bp, Homo sapiens
  misc_feature (1)...(373): n = A,T,C or G
tgagatgcagagtcccgtgtaacaagcaggaccttntcaagtacacactaagcatatgtctatcattgagccacactccagcctggctcccgtgcccctgaagagcatgtgacaagcctgaactatggcagattcctcttgtcatggtttttccggaagtatgccacacccaggaccttcaaaanggggaccactggccccatgtggctactcaaaatgcaaacgcccagtccttcaaccacactgaagagacaacctagtggggcccacggtcgctcaggtgaannnnggggaannanacatgcnggagtnggaagagtcnctagcatgcatanagccntgagctttatccgtacatcccatacaccacgtg

SEQ ID NO: 3379 - DNA, 114 bp, Homo sapiens
  misc_feature (1)...(114): n = A,T,C or G
cccaggacctgggggcatttancctgggaatgcctagccagganaagggnaccttaacntggctgcaatagntatanaacattcctnnncctttgtgggcagtaaatgaaagat

SEQ ID NO: 3380 - DNA, 466 bp, Homo sapiens
  misc_feature (1)...(466): n = A,T,C or G
actgagagatagctgaggtgaagagcaagagctcgccggagccccccgcatcagactggcttcgcccaagaaagcaaaagtcactttaagtgtttcagagaccacaacgacctgttttattggtggaaccgtgataaattaactggaaatgtcaaaggcaaagggagcggaagctattgttatccagaggnaacatttantngctgangctcatattngatattantgccannagacagtacgccacacttgtagcactagnatgagcaaactgaaagactggcacccnggccggcngatcnggnncttntgaggttagnggaccatgtgtgtgccaccacgactgtctcgntnagatgctgccagaagacnngnactnctttggtgcntaattntncnatcngangaagannnctggaaatcagctgaaaagngattctgggncnccgtttgtttgaggattctg

SEQ ID NO: 3381 - DNA, 137 bp, Homo sapiens
  misc_feature (1)...(137): n = A,T,C or G
ctgaggcgccgcggctatggccggagtagccgccggggtatnggcggaaagatgcaatccgtctnagngaagccctntcttcctgccatttcctggnnggcagacctcgacgtnagtcaccacatcaggctccgcct

SEQ ID NO: 3382 - DNA, 124 bp, Homo sapiens
  misc_feature (1)...(124): n = A,T,C or G
acaaacatctggagaatttcctcanagagaaaagactagagaacataaaaccctggcagcctaactcctcctctggatgagagaactatgccccaaggataaatctcacccttcctgaactcta

SEQ ID NO: 3383 - DNA, 233 bp, Homo sapiens
  misc_feature (1)...(233): n = A,T,C or G
gactgagagttttcctggcctgcccaatcttctccaanagcgccctctgctggatgacatnaggaccccgacagcctcagccatcttggaagtanagccaactggagttttgagagaataaaanggtggngctgatgtnactnaccggagncctcaggggggagactatanntgcagcggtagcttcntgagtagaggaaganagattttaccctggcagtctttctgtcaca

SEQ ID NO: 3384 - DNA, 255 bp, Homo sapiens
  misc_feature (1)...(255): n = A,T,C or G
actgagggaccggccgcccatctggctttagagacattnnggagaaccaanttncnttcctcaggatngcccagncngnctttgtcgtgaatacagngatgacgggatactggccctggtgataagcaagcagngttcaaaggaggggaagaaaatgtcatacaatggatgtaattagattcttattttctctgcaaggacttaggaatgcatatacacgattgtgtaaaggctttctctcacacaccaaaaaaa

SEQ ID NO: 3385 - DNA, 186 bp, Homo sapiens
  misc_feature (1)...(186): n = A,T,C or G
accccaaagttcatgtttctctgccanccggccgtttaaggccggactntttagngaatctnttccggntttncaccctcctgagccncatggcgggncacancctgnctnnccttgtggnatcctaaaaatgaatatnattagttcnttatatatacagangggtaagacattcaaaaaaaaaaa

SEQ ID NO: 3386 - DNA, 375 bp, Homo sapiens
  misc_feature (1)...(375): n = A,T,C or G
tgccttctgctactgcaagctggaagtgaccacgccnanagganccattccacacctggcanacagaaatatgttcacaggcttgcatggcaaagcaatggaaataccggaacagcattatggacaggaagactggctttgaacatgtncatttgtcgccaccanntggttgtttgtgtgacttgcagtggtagagaaattacagaactggggttnntgagtcacanagttctgaagttctgaaatggaaatctagttgtcaggatctcatagtagccgaggatttcataccattacttgaaagctcatttttctatctttcatcgtaaattattctttatgcgaataaagccctgcctccagttgtgacctctg

SEQ ID NO: 3387 - DNA, 248 bp, Homo sapiens
  misc_feature (1)...(248): n = A,T,C or G
gaacggacagaagttggnaaagagaagagancaggaggnaggacaatcagagnttcagtgattcttgcctccancaagggcntccttaactcaatccaactttgggccataaagagaaaaacngaaatcatcttcaaaacactggagggttttttccctaacttgagaaatacaccttaaattcttgaaggnattttaaaaagaaccaccatgccctataaagnacttgcttatgggctttaggtgtt

SEQ ID NO: 3388 - DNA, 267 bp, Homo sapiens
  misc_feature (1)...(267): n = A,T,C or G
ggaacgagccagactatgccaccctntactaccgnnngcatcctnnggctggggacttcagnannacttccctgcctnaacggggtncaatttgacaagtgccgaatccgtccttntgngntnaagcctcctgngggctctgggaaaggnttnttgtccatgcaaagnctggcnncccacaagggccataagttttggccangcaacggaagcctgcacactntggcctgtcacccacccctgagccctggacctcgggccattcag

SEQ ID NO: 3389 - DNA, 460 bp, Homo sapiens
ctgcaaagtttaaagcccttgacctcaggcactctgaaagaatgtcctctacagctacagattcttcgtcttcattgcctgtaatttggcttgaaccacaaccctcaggtgctcttccaacacagtactgaagaagtgctgcaactaggaggacagagacaactgatcagcgccaccaccagacgtctcactggcacaaatcaaaacagagttcctgggaaatagcaaaaccattttgcaaagagcattgatggctactaggaacagctatgcagacctccagcatgtgtccctggggaggctgtgagtgaggcagtgtgattatgaccatacctccccagaagggtgacatgtcagccggaaggagtatccatacagtaagaacttggcctactaacttccctgtttccaaagtacatcatagcgctcaacaaatagttactaactgcatactggatat

SEQ ID NO: 3390 - DNA, 196 bp, Homo sapiens
  misc_feature (1)...(196): n = A,T,C or G
tgctcagttcctgaaacctgccnagnatncactangaggccnncnatnttgnaccnaaangggagccntncccgngttgaccatggcctgcatacacttcttcccagganaaggggaatgaggaaggtgggggcctcaaaagcctcctttcctttctgttnggctncctatgtctttattctattttttgtatctg

SEQ ID NO: 3391 - DNA, 114 bp, Homo sapiens
  misc_feature (1)...(114): n = A,T,C or G
taccaaaggatagaaagttctcgaccncgcagatcttgnanggtggnggnntcnanttttgagggnagacaatagggggacagtaaagcccactttagttttcaaaaaaaaaaa

SEQ ID NO: 3392 - DNA, 124 bp, Homo sapiens
  misc_feature (1)...(124): n = A,T,C or G
tgaccatgacaaacacaggggtgctgtnttcctgctgggntccaaggcctgaanggaacttctatcatggcctcagtngngctanggnctggggcctattacaagancaggaatggaggtattg

SEQ ID NO: 3393 - DNA, 323 bp, Homo sapiens
  misc_feature (1)...(323): n = A,T,C or G
cttcttgaggaactctcnanggtactacaggannctgtggangnncccttatcncggccnngctcncatgganaatccnctttgtganggcgacctantatgagaggtcatccnccctttgctannnncgggtaaaaggcagatcacnctttaaagnggatntgngctccagggnagggaatgaccgtggagtgcatagagacatacaaacctttatggaaatgggaaccanngcatcangtgtgctggcactcaggaggtgggaagaggaggacangagttcnnacccagcctgtgacacatatgagaccctcgctcaagaa

SEQ ID NO: 3394 - DNA, 157 bp, Homo sapiens
  misc_feature (1)...(157): n = A,T,C or G
cagacacatacaagaaaaaaggaggggaaaatggcctnncatcancatcacttcatcacaccnctgtgtncnangggnancgatgtatcntattctgnaagtcgcctattctcctanaangtntaggancattctttcacctgcaccgcttcgcaag

SEQ ID NO: 3395 - DNA, 137 bp, Homo sapiens
  misc_feature (1)...(137): n = A,T,C or G
tgacctggaacactgggtatttctggagacagggactntctgtnnaanacnatgtttatnnctcggaactcanggatctnactgcctgtgattcntgagttctggnaataaaagngtgcaccaccactgactaaaag

SEQ ID NO: 3396 - DNA, 167 bp, Homo sapiens
  misc_feature (1)...(167): n = A,T,C or G
tccagcttagacaggatacacccagnagagcacatggnncggntatgncagacacngnaaagaanatggtttggctgatgnnagaggattcgggacacangnntagncgagaagcgctggggttcaaagcctggaggcccctcatgntacngcttactgtcctgttt

SEQ ID NO: 3397 - DNA, 250 bp, Homo sapiens
  misc_feature (1)...(250): n = A,T,C or G
ggcctaagaaccagggnnacccaaatgtaaactcccatctgaaataggaattaactcgattaaatgactaagcagcgcgggagaacaggaagaatgcctctttctccatccttagttccgggcctagaacattaacttgtatctgaagatggccaagtgtttgcctctgcttctggngggattaaaggccttgctgctactcctggctttcttcttgaatcttgnaagtctttctcttttctctaagagg

SEQ ID NO: 3398 - DNA, 252 bp, Homo sapiens
  misc_feature (1)...(252): n = A,T,C or G
aacaaataatcacccctggaaagctgggcctgacgatggcatccagcactgggctnactctaanggaaatgctctgnaaacntgcacanntgaggggnactgcatttacnctattaggcnngaaaatntataggccaacctccgtttcagaanagagtttnangngggntcacatcggatnttnattttgccatntactctgagatntgttagggacagaaggtacctattangacccccccccttttaaat

SEQ ID NO: 3399 - DNA, 233 bp, Homo sapiens
  misc_feature (1)...(233): n = A,T,C or G
accttgctcgaccactgagtttactgaggttgcttacaggagtgtgggtgaaggggttcccttcaggagcatgggaagcccaaaggcaactgcatcatctaaaccccaccccgatcatccaaaccccaccccaacagggctgatgagtccanagctgtcaagatgcctcaaggnagaaggaaatttccatacaagatataggttcttctcatttggctcagaataaaatatga

SEQ ID NO: 3400 - DNA, 140 bp, Homo sapiens
  misc_feature (1)...(140): n = A,T,C or G
actgagctgccgccccagcgnncctgaaacaaacctcgctgcgcttgctcctgcactngncactcacangnccctgcacctgcactngggcattttgctgggagcgacagagactccgagggctggcaacaaccggaagg

SEQ ID NO: 3401 - DNA, 105 bp, Homo sapiens
  misc_feature (1)...(105): n = A,T,C or G
gactgagagtcgactggaaacttacaccatggcgtgattagaccggttaaaantacgcgcagacntgaagacacgcctttaatcccagcaatcaggaggtcaggg

SEQ ID NO: 3402 - DNA, 144 bp, Homo sapiens
  misc_feature (1)...(144): n = A,T,C or G
tcagaatgagattcctttattcatcanctatnccatctnctgtactcagttacagcttcagaaaatgaacgaggatgtctttgacaaaatnttggggcancatanctacagctggngatcatggaagactctgagttgtcaggc

SEQ ID NO: 3403 - DNA, 136 bp, Homo sapiens
  misc_feature (1)...(136): n = A,T,C or G
actgtgtaaaaagcattattgaatgtacatataacataggaattaattaatagctagctattatctaacatcaaaantagctttcagattttctaatngataaaataatnacagncccaagtatccttctgaaaaa

SEQ ID NO: 3404 - DNA, 204 bp, Homo sapiens
  misc_feature (1)...(204): n = A,T,C or G
gactgagcttctcaccgagggcacatggttgantatgaggacagccagttctccatcgccangctatcannatccaaagagaaacactgnnaangcgccagaattnagtgcnnaattcaggaggaagtgtgtcttctaggttctccaggaaaagcttcangctggattacagactngaggaggacgtaactaaatcataaaaaa

SEQ ID NO: 3405 - DNA, 153 bp, Homo sapiens
  misc_feature (1)...(153): n = A,T,C or G
atagaagagcccccgnaaaatctttgtgccgcntgtcacagaganccaanaatcacgacatcatacattgatgggaatctctatgaatgtaaggactgcgagaaagtnttntgaaatanttcaaccctaantaancattacagaagaactcat

SEQ ID NO: 3406 - DNA, 224 bp, Homo sapiens
  misc_feature (1)...(224): n = A,T,C or G
gtagtggcacaagcggcagcncgcaggaaactgaatggcaaggctgtggcaacatgtncaccatgcttccanagnactgnaactaagggtgngtgcacactcaanatcttgaccgtgtcttatcgtcnggaacggtgctgacaaataaacangagctnacnctgcaaagatggtttaagttggtcnagnacgcccaatgagantgagagaaaagattagcatga

SEQ ID NO: 3407 - DNA, 178 bp, Homo sapiens
  misc_feature (1)...(178): n = A,T,C or G
atcttcagaagagcaggcanggctctaanccggggngccatcgncgccagcccnctncatttctttttnaaggaaggaaggganccccancnaaaggaangacaggncttgccctccctncttttngagccntttncccctttcacccatatacctcaataaaaaccaggaaaaggaa

SEQ ID NO: 3408 - DNA, 504 bp, Homo sapiens
  misc_feature (1)...(504): n = A,T,C or G
gactgaggaattttccatccttggggaatgattgaaacagaagctcatttctcaagccagacgtggcgcacacctttaattccaggacttgaagacagaggcaggcaaacagaactctgagttcccagacatccaggactacatantggtcaggtttnctnngaatgtgncctctgncactgagcgnnatgccaagagggngggacttgaacctgtgagcangnggagggcctatgaactcgaangctatcctggaaagggctcctgagagagagaacggnaagntaggcagcnattntgattncttccatangaagagctgtgaatagatatanttctttaacatacctaanacncattcatgcccgaccccggaacctatcctagttttgcccgctctggagtantntgnttaatgttaccaannactanggaaactnaaaagtnttgtaacacattngatgangaagattaaagatacactntaacctctgggaaatatac

SEQ ID NO: 3409 - DNA, 121 bp, Homo sapiens
  misc_feature (1)...(121): n = A,T,C or G
agcctgggctgctcttgcagattccggttccattcccagnatccacacagnagntnaccactgtctgcaattgcagtccaggggctcanatgccttcttntgacttctatggagaccaggc

SEQ ID NO: 3410 - DNA, 284 bp, Homo sapiens
  misc_feature (1)...(284): n = A,T,C or G
tgtgaagagtttttgctcttcagtgacaatactgatgaagaggtgttagacttgcaacactggactggacagtgaactctgagcttgctactgctctagtttgntggaattngtggctctgtgnccagctactggctcctacagaccggangaagcagattgnagacagaagtgggagaaagcctccagctggnacattctcagaagggtagncctcttggctgntgggccctgtccagcctgccttatggagaagatgaactggttatcccaaagaaaaaaaa

SEQ ID NO: 3411 - DNA, 173 bp, Homo sapiens
  misc_feature (1)...(173): n = A,T,C or G
gactgaggaggggtaagggngntgccctgtctacccaaaaaaggctaagaatattcaaatgaatgttaaaagatcatggaaaatacattattattaaaagccctcctgccacaatggactgagccctccaaaactaaataaaacaggcctttgctcctgccagaaaaaaaaaa

SEQ ID NO: 3412 - DNA, 502 bp, Homo sapiens
  misc_feature (1)...(502): n = A,T,C or G
ctgcccgcccagagaggacgcctagcccacacgtggaaccccaagcttcggggtttcctaaaaagcttcctgaatgaagaaacagtgtggngggtcaggggaaacctgacgctgcccggatcgcatccagggataaatcagacaggaggtgatgacgtcttaaggaaccaaaagcctggcgagtgcccttccgtggtcacacactctaatgctgtcttctcaagatggaacctgtgcatagagaagcatcatttcatttgccaggctgccgcctttccccctcaaggtgcaagcatttggagaaatgagtttggtcctggccctctgttacccatgaaaagaagaggagctgagacagagagacatatgatcccaggaaatggccccccgttagccatgtgtcaccaacccgctcctcctgagcttgnaagtactgcagtcccaagacaagtgtgacatattcagctctctgcggtctgatgggtcctgccaggatttatta

SEQ ID NO: 3413 - DNA, 186 bp, Homo sapiens
gactgagtctctatctgtcccagcagtattgctgtttgaccgacgccatccatgaatcagctgctgactacagcctgctcatgagccctggacttgctgagagctgatgagaactgatgggattgttctctgtcccttcaggggtcagcaaaccagatgctcctgataaatgtcccattgcctgaa

SEQ ID NO: 3414 - DNA, 127 bp, Homo sapiens
  misc_feature (1)...(127): n = A,T,C or G
ggggctaaacccttaatttacactnatnanaaaggaagctctgtccagaaacnttgagtgcagatccagaancgggctccaacatttacaaaatatggtgcctatnanaaagttaaaaaagggaaaa

SEQ ID NO: 3415 - DNA, 113 bp, Homo sapiens
  misc_feature (1)...(113): n = A,T,C or G
tttcacatcagggtctcagctttgacttaatgcaagtagctccaaccagccacngcgtgtggcnacacanncatcttangngggaccacntggtcctccttcggggcctgaag

SEQ ID NO: 3416 - DNA, 181 bp, Homo sapiens
agctgctgccacatggcctgaggcaagagtaaggagtcagcaacaatttccacccccacccacagcatcccccaagcaagagttctggaatatccctagagccctagccaatcccacagacctccacacccctagagatcaagccgaccaatctagataaaggccatctactcttccctgg

SEQ ID NO: 3417 - DNA, 150 bp, Homo sapiens
  misc_feature (1)...(150): n = A,T,C or G
agaagccccttttatgnggcatgaganttgggagangagaagagactcnganggnnntagctgctgnntccacctgtggnncgggcagcttanggaagatgtgcctctccttttcattntttctttctttttaaaaaattttatttctca

SEQ ID NO: 3418 - DNA, 161 bp, Homo sapiens
  misc_feature (1)...(161): n = A,T,C or G
gtggaggcagcaggatagagttngagcctagcctggagatatacctcggagacagatcacgtaccgggcatcatgctgtggttngattccccagnatcgtnaccanggacaaaagantaattacattatntagttaagtgattaaaaaaatacctggacgt

SEQ ID NO: 3419 - DNA, 271 bp, Homo sapiens
  misc_feature (1)...(271): n = A,T,C or G
ttgtacaatgttcagcctttgcagcggagaaagtaatgatggttaagaggctcagaagaagccaggagtatagctagctctgtaatagagcaatggctgacatccataagtctgggatccttgttcatgagagggaccacacacattcaccatgaatcttccctcctgataacatatgcccagagccatgtcgggtgccgccaccaccaaagattagcatccagctttgttcacataataaagtanaatcctgttccggcaaaaaaaaaaa

SEQ ID NO: 3420 - DNA, 350 bp, Homo sapiens
  misc_feature (1)...(350): n = A,T,C or G
ggaacactgaggatanctgagcctacgcaggaggtccattgcttgngaaancaacacagcttgggacagcatgtnctccccgtgcagccctntctgnttgtagaatnccattctcttctctcttttcctgggcagaaaaccagggacagaagagtgctccctacgcggnaaggctganntactngnttacataaactcacatttntaaacaatcaggatgtagaggctgggacgctttnggngggggagtgcttgcctagcattctaagggttcnngagttncatctgcagccctgnaaaantatacnggggccatataataaatgctcacncaaatattaaaaaaaaaa

SEQ ID NO: 3421 - DNA, 113 bp, Homo sapiens
  misc_feature (1)...(113): n = A,T,C or G
tattacaacctattaaaaaacctanaagttaaaangggctatttaatctattantctatngaaaatattnctgaatncaataaanctcttttatttaacctataaaaaaaaaa

SEQ ID NO: 3422 - DNA, 112 bp, Homo sapiens
  misc_feature (1)...(112): n = A,T,C or G
gtcagccagccctggggctgtggagngancnctgctcttnaaaggacccgagtgagtgcctgcctgcaaagnagtttgcaaagncttngcatacacggctgccccaggaagg

SEQ ID NO: 3423 - DNA, 295 bp, Homo sapiens
  misc_feature (1)...(295): n = A,T,C or G
ggtttgacgtgctcgnaggacaganatcctacatcnctncattcacttgacttggaccnctaccctcttggccccactcctgggtacccagagggnagntacangnccattnccaaacagtgacnnntttntgagactncacncgatggtctaatggctcccangctttngcattngccttgccanatagccgccatttttggnccctntctagggaaanacttaggtcttcttttacctggggcttggactcaagggncctcatcccctggagctganacactgggcttcatgc

SEQ ID NO: 3424 - DNA, 435 bp, Homo sapiens
  misc_feature (1)...(435): n = A,T,C or G
actgaggaagaaaacacacgtgtgaggggctgataaaaatgtggacgacgagttgtcaggaaaaaccaacccatacccagttgttaagatagtacaaggtcgatggatagtaacttcacaatggaagaaagttggaacattacaagcttggagccaaaattatctcgggctggcttttgcccccttaaagataaagccattgactgtcctcctgtgtgcctgacccaacaccntttcacctgtctggcaaactgctggttagtttatgtcagcttgactcaaaatagtcacttggttgtgaagaggaaagagttgaggcattattttcatcagattggcctgtggaacagtttcttgactaanggacgtgaaagggtcccacagcagttggaccttgcttgtaataaagccaataagcattctcaaaaaaaaaaa

SEQ ID NO: 3425 - DNA, 182 bp, Homo sapiens
gactgagatgctttcagaagtatggagctaaatgcaggagccctggagatgcccagaagcacacacgggtgaccattgcttgctgaagatgacaatgccagtctgtgtggcttctgaactctgacattatgtccccaaactataaccttacattaaagagtacacgtgggatgcttaggaac

SEQ ID NO: 3426 - DNA, 164 bp, Homo sapiens
  misc_feature (1)...(164): n = A,T,C or G
ttcggaatcatctactgctgctttggctaccgctgcttcaaggcagtgatgtttctctngggtctgctgtcaggagccctggngatcttcctcctgtgccataaagagcgggngctagagacacagctgancctggaggngagcgcaggcatagcactgggcat

SEQ ID NO: 3427 - DNA, 288 bp, Homo sapiens
  misc_feature (1)...(288): n = A,T,C or G
ccccagcactgataanccctggcttcncttcgggngtagggagnnttgcacnggctagatctcantattctaacccacngcncccaactgggnttggaaacccttgaagggnagccccaccaccnccgnggccaccctttttnttaactggggaccccggaagcatttattttccgggggggggnaaattccggggttccccccttcccccccccttttccttttaaataancctgnggnggttcccgcnaanccatttaaaaaaattttttgaaacccctttgggtt

SEQ ID NO: 3428 - DNA, 451 bp, Homo sapiens
  misc_feature (1)...(451): n = A,T,C or G
gcgtgcatgcggtgcacagccatgcatgtaagcaaaatacctaaatattctactagaacattcgaatctttgaaagcagcaaaggaagctaagcagggacattctcctacaaaatacttgcccattgctagtcaaggttctgaaaaccaagaccgaagtcagagagtggaggagacaagacagtggtgtcctgaccagaccccggaactgaggggagccattgatgggaagatgcgctaaagtggaaagagcggctcacgtggacgaggttctcctgcctggtcgccggtactatatctgacacctggcacagcggtgctctgccgagccagcagtgggtacagccgatagcttatatctaaggcatnccctgtatgtngtcaggccaggtnccaaacnctcacaaaggcagacacatntaantattggggggttttgcttcgttatagat

SEQ ID NO: 3429 - DNA, 314 bp, Homo sapiens
  misc_feature (1)...(314): n = A,T,C or G
ccctttgaattttgctagccttgggaagggaagttctgggatggnctgccttgngcggaagantgacaccannaagntgtacgccatgaanttcatgaacaaacagatgtgcntggtnccngaatgaagtgaggantgtcttcaagganctccatatcatgcanggcctggagcnccctttcctggtgaatctgtggnattcctttcaagatnnngaggacnttgttcntggaggtgganctgctactnngtggtnacctangttatcacctgcntctaaatgtccacttcctngangacacaatgaatctctt

SEQ ID NO: 3430 - DNA, 124 bp, Homo sapiens
  misc_feature (1)...(124): n = A,T,C or G
aaacaataattatattgagccntgtttccaaagaaganancattntngcctccgtnnnacaagcagggtctgaggagacaaaagcagccataagaggttcanaatagaataagctttcttcagc

SEQ ID NO: 3431 - DNA, 313 bp, Homo sapiens
  misc_feature (1)...(313): n = A,T,C or G
gctctgcttctccggtgttttaaactagaancngagngaaagnnactatgnaaatgaaangaaaaaacctttcgnaacccgncgcggnatcctgcccctttcggttnctcgctnctgggcgtgtacaaggcaaaaccagaacaaagctgggctggctagagccggacacgaggaaaccaattgcctgtagtgtttcattttccgcacattgggaggaactgnntcccgtcgaaacattatgtatggtctccgtgtgaaccctttngtattttgctttcgcacgtcttttggaggaagggggaaggatcgttcc

SEQ ID NO: 3432 - DNA, 375 bp, Homo sapiens
  misc_feature (1)...(375): n = A,T,C or G
gactgaggggtcaagcacctgtgaaaggaanaggacgcaagcagaggaggaatgaagctggtcccacagtccgtcagccagccctggcgctgtggagtgagcactgctcttcanaggtcccgagngagtgcctgcctgcaaagtgtatgcnaagtctttgcatacaggctgncccnggaagggcataatttnggggtgggtcgggaggnggnnaagcagcagtggagaaaaccgataattntnngattataccccgggagtcttgtttgtttattatactaatcacatgtggntcttncgtgatgtctaactgagaagagaagagaagggaaggcnaagngatngttacagganttaaacttagccacagagttg

SEQ ID NO: 3433 - DNA, 425 bp, Homo sapiens
  misc_feature (1)...(425): n = A,T,C or G
actgaggtcgccaagttggttgtgcattttctcaaagctgattcacgtggacgcgttctctctgtgatgtctgcgtccctgaggactttcccaaaaggcctgcggtgaaagaggacagggtcatcatcggctgccttcattgttttctagccaagcacaacaatatgcaataggagcttaacaagaagggaggagataggcccagccctcagcccagagaggatggaggatggctgctcaggagccaaccggagagtccactctgcccatcccaacatccccacagctggagcactgggtttgccaagtcagtggactggctctctctcacagctgctctgaccacagaggagaagggggctttccttggcctgaactgctggnaagctgtgggtgggaggnggcncccccagtttcctgaagca

SEQ ID NO: 3434 - DNA, 122 bp, Homo sapiens
  misc_feature (1)...(122): n = A,T,C or G
gactgaggaggacctgtccctgancctcctcaggtcatccatcgtcctcgaaggatccatcctgaggcatcaactgaaaattatggctcctgagaaagaataaagcacactgttcactgcca

SEQ ID NO: 3435 - DNA, 247 bp, Homo sapiens
  misc_feature (1)...(247): n = A,T,C or G
ctgaaggtccccaacaannaagcatatcgggnaggcagtatctntggaaggagcaccagtangaaagcttgcagcttggncatcccacagctttntgtgatgggctgaaggcaccagagacttccacagacaggagaaatatggcctctgcctcaagaagctggtattgacaagaagctggctggaaacaagaataaacaagtgttcagcaccttaaaataaacaggtgacatgggccatgaggaaa

SEQ ID NO: 3436 - DNA, 126 bp, Homo sapiens
  misc_feature (1)...(126): n = A,T,C or G
ttttgtctaaaagatttnagcgctgctaggcccagnctgtcnttatntncaanntatgaaaaaaatacaccanttcatgagatggtttttctctactgcccatggccactaagaaatcagagcagc

SEQ ID NO: 3437 - DNA, 433 bp, Homo sapiens
  misc_feature (1)...(433): n = A,T,C or G
gactgagagttgcccaggcagctgcaggccaggtgcctggagtacccccggggggctattatcctagtcctccccatggngggggccagtatggcagtggactgcccccaggtggtgnctatggagctcctgcccctggaggaccctatggataccccagtgctggaggagtcccctcggnaactccaagtggaccatatggcggtatacctccagggggtccctatggtcagctacctccagggggtccntacggtacccagcctggacattatggacaggggtccttgnaagttncacctccaaggngagggccantantgtaaaggacagagctgaccatcaaanacgctcctcngcntgctggaanatccnaaagggcctttccggnttacccactgccgtcagccctaaccttccatccagcaaattt

SEQ ID NO: 3438 - DNA, 459 bp, Homo sapiens
  misc_feature (1)...(459): n = A,T,C or G
cttgggataaacccagggttncaggtaccagaggnaagtcctacatnaaccgagccacatccccagcctcnggttattnttaagtagcatnaagtcttctttccaagacagagggaaccttggtgcatctgctctatctgcggtgcatacaccctggcgtatcccagggagctgaggaagaggaacagcgctctgccggcagatgatccaacttngggaacttgatcccctgaaaaataacatttgnggcctcatgtttccccacactatgggatgtctgccctgcaagctgcccatcagtcctgcgtttccagcacccggggagcctctgctctcctctgggagttgcgtttcatcggagactcagctgggagatgagngcattaangggnctatttatcatctgctttggctggcttnatccctagggatgggngccagaggccaagggaaggagct

SEQ ID NO: 3439 - DNA, 297 bp, Homo sapiens
  misc_feature (1)...(297): n = A,T,C or G
actgagggagaatgtgacacgatnaacatctccagcttgggactttctgnacggaanaatcccgttcactgtcactctgcatgggtatctgagttanatggagaccaancttctgncatgccaagtcgaattaaangcagacaggnaagtagtccctctaagaaaattctgacaggtgttactgctgtggtggggagggaaccgaaaaatgtttaagttgaacaanatttttgcacttttgnttttggactcatctgtggacagcttnttttgtgttcaaaactacctaaataaaaa

SEQ ID NO: 3440 - DNA, 220 bp, Homo sapiens
  misc_feature (1)...(220): n = A,T,C or G
tggagaagactacagcctatccatcagacctaggagcctggagttatcanaaaattaancaggtttatnacctctactgcaagtngaggctgatnangttggccaatttaaaaactctaggcaccccaaaaatgcatgcctcaaatccaccaagaaccccatgtntgaactctnagacatctaaataaaacgacctggcagcttaccccaaaaaaaaaaa

SEQ ID NO: 3441 - DNA, 252 bp, Homo sapiens
  misc_feature (1)...(252): n = A,T,C or G
tggctagccaccccacattcntgcctggnagaacctcgccgttactgacagctctttntggatnattactgnancaggatnttatctactgagcacctccggttgttcnnttctccacattnatgcctgntgacccnatcctgaccngnnccgaanggcttctgccttancanattacatctgtncncggncatgctttcccntgctacagcacagcctcctnaggctcttgactagccatggatgagcctg

SEQ ID NO: 3442 - DNA, 150 bp, Homo sapiens
  misc_feature (1)...(150): n = A,T,C or G
ctatcggacacccctctcccttgctgaggaaagcctaccgannaagatggngccaaccanaaaagaagcagtngnnctatgactggcaggagttggttgaaatattccagttgtgttgtttgactttaaagattatacgaatatttctaa

SEQ ID NO: 3443 - DNA, 142 bp, Homo sapiens
  misc_feature (1)...(142): n = A,T,C or G
tcctcttcaatgggctgnanaaaacactgtcactcaagctganccatatccctgntgttggccttccanggcctatcaanattttccccttcaagtccctacggcagctggagcttcnaggagnccctatccacagcctgtg

SEQ ID NO: 3444 - DNA, 239 bp, Homo sapiens
  misc_feature (1)...(239): n = A,T,C or G
acacaaaaccgctgtgtanatgtcnnatcatcagcagagccnctgantattctcccatctgtcaaaggcnnctaacctttgnctcttacacaaaggagcctggccaggaccacaggtctgctcctcctgctgtctgaatcttgcctctacctcagactccatgagtttccagatgactgactgaggtanaagnnaggtttggatgctgtaataaaacccaacaatgatgactcatacgt

SEQ ID NO: 3445 - DNA, 308 bp, Homo sapiens
  misc_feature (1)...(308): n = A,T,C or G
aaatagcgaggctcctccaattggctacagagtctacggaaatggaancngctngatgtngcaanangctgcctgaacaccaccagaatttttngatgggntncnctctatnnagtgacagatgaatgatgnccatcaaanaagagnntggcataccaataccacacngcatnntccactctgggnnggattatacttataccctttccaaatatcacattctctcaagcatctgctctagcaaaacatcacatgtcctttttccaggctgntcccaaaaaaacaccagcaaagcatcctcccacatg

SEQ ID NO: 3446 - DNA, 279 bp, Homo sapiens
  misc_feature (1)...(279): n = A,T,C or G
gaggacctgggctcagcctcctatcccacctgcnggancccngtnacctgggnttacccacgccangctatcnacagccanctanattacatcgctnttgtgggaacaatctttctaacaattgtggctttnaagattnangctttacacacaanntttntcccaacctgcaaccaatgttttnttgtgtttggagatcatttatgactacacactcattctgctcacatactgnatattcagctgntcacaactaactgggttctataaaaaataaaa

SEQ ID NO: 3447 - DNA, 373 bp, Homo sapiens
  misc_feature (1)...(373): n = A,T,C or G
aactgagggaacctttggagcctggaanctgnctaaaagggacacctttcanccctcccngggagactgnnctgagctcccacaaccctgcctgagcggctgtgtggctaggagtggttgtgcccaggagaccatttccaaagcaatccttcagaacactgnaggcccntccccccagagtttgtcatgtgtctggaagtggcttctggagacaaaggctcccagnacacacacaccaggatctggattggtgagacatgaaatactgagngaaggatggggctgaagtccccanattgtttangagtccgaancangggcgattgaggnggttnttgataaacacttgatactcnacatcctaaaagaggct

SEQ ID NO: 3448 - DNA, 115 bp, Homo sapiens
  misc_feature (1)...(115): n = A,T,C or G
tgccagattgcagctttncatgtgtgcacatttanaaagtgatggncagaantcaccagagngancntnaacctgagacaaccaacagtganntgnggagagccaaactgaccca

SEQ ID NO: 3449 - DNA, 190 bp, Homo sapiens
  misc_feature (1)...(190): n = A,T,C or G
gcatgcaaccctgaccaatcttganccaggtgatgtcctaactatggatatcatatttattgattaattgccaactgggaacccttcntaaagcaaaaaggagttcattggaacttgcctgttggcttctattgcaaatgctttccatatacagagaataaatactctctttgagactcaaaaaaaaaaa

SEQ ID NO: 3450 - DNA, 215 bp, Homo sapiens
  misc_feature (1)...(215): n = A,T,C or G
ggatcgcccctggagctgaggctccaccagcagncatgggcgcctgnactggncccaagcctggctatngngcctgcccatagtatgggncgaacagnttanttggccctattcacctccatcntgcncantgtntataatgatgtactacatgnacaccttcgtactcantgaataaaataaataaagtgtccttctgggttggagagactgta

SEQ ID NO: 3451 - DNA, 390 bp, Homo sapiens
  misc_feature (1)...(390): n = A,T,C or G
actgagactcctcacaacacactgcctatgntttattaattacgcacanantctccggtaagccggncccttttcctctcagtactcacnatgggaggacagntttgcanaaaggacatcatccanctaatngccgaacttngtggatcccaatccaagatttccctanaanctcatggagacgagttatagncatgacgtctaaagttgnntctaaaanaattctcaaatctttaaaatcagtatctgtaaaanaaccggtaatatcactgaaacttcacaacccgtctcagagaaggtccccaataaaagcgtggtacaccgttaaccacagcatcaccaagtcagaattataataaaaacacacctgtacctgctgaaaaaaaaaaa

SEQ ID NO: 3452 - DNA, 305 bp, Homo sapiens
  misc_feature (1)...(305): n = A,T,C or G
gcagcaggcctaattnctangctgcgnacatctgctggacgtnaggnanagtngcngntgcttatactgaaactgtanccttctgatctacccacagatggttccacagaccctggacagccaattctgctaagactagaccaacattcccaacattcccatacccattttcctaggtatcctagagacacgtcaccccaaagtcagctaaagatcgctatgaccatattcctgctccgccatcacctctttctatttttttcttttttaattaaaccgaaanggggnaatgttggcaaaaaaaa

SEQ ID NO: 3453 - DNA, 111 bp, Homo sapiens
  misc_feature (1)...(111): n = A,T,C or G
actgactaaagccctancnaaagtgtagaaagccagcatttaaangcgntnttnnctancatnnaaaaggaaataatggncgtggagccaacaactcaataggaaatgaaa

SEQ ID NO: 3454 - DNA, 361 bp, Homo sapiens
  misc_feature (1)...(361): n = A,T,C or G
gactgaggagagatgaagaaccacagcatgaaaatctaccagaagacaacattttcgtcccgaatgaagagtcgctcacaccttggccagctagcttttttcgctgacgcaggcagctcctcctatgaacgtctggggctagatcccactcttattctcaggctgacagaaggtgnagacgnaccnangcnggganncgntttgatnannaaccaggnnnaaagggntcanntgaaggggganttngnggncantnnctcccgtagagaangcaagccatgaggctggagagacggnttantcaagagccctttgcgactcttgcagaanaccaggggtngggtcccagcatcctcaacag

SEQ ID NO: 3455 - DNA, 299 bp, Homo sapiens
  misc_feature (1)...(299): n = A,T,C or G
ggtcagcatccccgcccaggcttcaaccaggttccctcccaggtccaacgcctacctgattatagggntgcnaaangagctgaccaanngtgggatcttgaanaacntgaccagacgacgaggatttttggaaactggttcnggaggaanctntnggagngngaactannnaaaagntccaaaagataanacttnggtngangaatnccaggccctggccaccanctgnttccagganatgggagaccgngangctggtcaccagtgannaagacagtggggcccgccggggaacacac

SEQ ID NO: 3456 - DNA, 124 bp, Homo sapiens
cagagactcccaggggtatgggcagaacccagccccacagaactggtccaaccccaagctcctaaattgttcaactaacaagttcagctatatctgtcatgattaaacaatacccaatgacctc

SEQ ID NO: 3457 - DNA, 328 bp, Homo sapiens
  misc_feature (1)...(328): n = A,T,C or G
gactgaggaagaaaaagggaagaaaaccagaagaaagagagaaacagaagaatgaaagcggcgaaggggcatcggcgccttgagctacctcactgcatcacaatgaatatggactctattaagctccgttctgcctgttagtgtctcccggggcaacacagcccccatatggcaagcatgcagcanattagggtaggcccccaggccgcatggaaggccaggggcttgactggcagttgaacccccctcccttcccccgtttctcctcacacttgacactgcctgtgtttatctaaagcaaggagggtggggggagttggaaggtttt

SEQ ID NO: 3458 - DNA, 435 bp, Homo sapiens
  misc_feature (1)...(435): n = A,T,C or G
gactgagcccaggagctaagaggattgattacaagtagngctttcgtnatctgtcctaaccctgggaaacaggcactttaaccatcaacttttctggcacacagacttcctgtatttggtgacttgttttgaacttcggcaagaaagaaggaaagcccatggnatcttccaaagctcaagaggcaactctnactttccttttgtctaaggccttanagttnaaatgctatcatctggttggaagagaataataacagggcacccctcaagggctgatgggtgaggcccgntgnantcaatacaggcgaagnaagagtgctcagcagagcatctgtaagtacacagtacacagcaggcatccttgtctctgggggtagcacactngggaggaaatcagagncatttatgcagaatacagncacttcccagcagagg

SEQ ID NO: 3459 - DNA, 420 bp, Homo sapiens
  misc_feature (1)...(420): n = A,T,C or G
ggctcactgtgtgtggngcntagcatgaccaganttnaactcnttcccagncagaancctccgctctgtctgccatcccagcanatcccncanaaanatgngaggcnaganacggaagaatcccctgggagcttgaagggctgctagcttggaatacacagcacggtggacacaagagagacccatcctcancatgggggaaagagagagtcaactccccacagtggttctctgacctccatacaactgcccacacacagccgtacagtggagaggatctgggctgggacagctcaatgcctggcagcaggagctggggtgaaacttacacctcactgaatcaggangcagtgtgcttaggtaagaaatgagagagaccctannaagccaccttgttctacaatctataaataaataaat

SEQ ID NO: 3460 - DNA, 189 bp, Homo sapiens
  misc_feature (1)...(189): n = A,T,C or G
gactgagattctacaaggcacccaggtggtaaaggatgacctcataaaagcagaccgagctccgagaaatatcctctatgtgtgaaagaagtagtgagggaggcatctttaatgaaggcattctctgcanaggactggaagctggagctgaaggacaatcctgtgggaaaactgaacctccttgctgca

SEQ ID NO: 3461 - DNA, 219 bp, Homo sapiens
  misc_feature (1)...(219): n = A,T,C or G
tgcctggccatcctggatcttnctgtgnngaccaggctagcctccaactctcagagagctgccggacatgagccatgctaactggctcttctgttatatgcagacaagncttcttgngttaaagagtttgtttttattttgtgnatataaatgccatactgcannggaaanggcganccatctatcatgnnggatncacaccatgctgtgtgactatga

SEQ ID NO: 3462 - DNA, 307 bp, Homo sapiens
aaagcaggatgcagccatttccccaaaccactgcatggggtgtggagcacattcaagctggttcctttctctcaaggctcagagccagaagagactgctctcacaggcttggtctcaggcgggcagaagcgacctcctcctacttccattccctccctccggtatctttcactcaggacatcacaatccaagaagtcttgatgactctgacagatgtctggtctgaccagaagagaaactgggaataatcatgcttgctacttgctacctatgccattttgagaggaaagagggacatctgagccat

SEQ ID NO: 3463 - DNA, 273 bp, Homo sapiens
  misc_feature (1)...(273): n = A,T,C or G
agactgccgagtgccntgatgtagacgaagancgaaactgancatcanngnctatgtanagngcacggacgcnggnaggcggtnctatttcaccaccgccacctcccccatnnagattggaggttcaccttaaatgcttagtatgcanagctgggacttatctcagtgatggaagtgtttgcctggcatgggtgcgntgntatctccaggactggggaaaaaanaaggtgancccttnttantccctgcnaaaaccntgaaacgttcttgctt

SEQ ID NO: 3464 - DNA, 371 bp, Homo sapiens
  misc_feature (1)...(371): n = A,T,C or G
gactgaggcactgggctccctctgctccccgtgggccgctccccgcgtggggccactgcccttggcccccgccatggtgcggatttcaaagcccaagacgtttcaggcctacttggatgactgtcaccggaggtatagctgtgcccactgccgngctcacctggccaaccacgacgacctcatctccaagnccttncagggcangcagggacgngcctacctnttnanntctgtantgantgngngctgcggcccacnaaaanagcgggngctgctganaggccttcntgcngacnntgacanncacngtganaacngnncnaccactttgggcnggaaatatnagcatgcctttgagagcagccagaagt

SEQ ID NO: 3465 - DNA, 344 bp, Homo sapiens
  misc_feature (1)...(344): n = A,T,C or G
tcctcaccctaaccacacagnngggctgagaatcctcataagctgagaaacataagcagaaaaggtgcagcaccgtctagcctgggagtcctcaatgggaacggcgatggagaccccagaaggagagttttgaagatgacaggggcctcggtcacggtgcagccatgagaatgagaaggccaagcttctgcagcctctgtatgaaggagatcagnggcaacctgaccagcagcctgggaagttccagaggatgagagcctctttcctgaatgctatcgagcttcctttgtgttagacactcatcgttctgngatctactcattattgaagcctcggccaactga

SEQ ID NO: 3466 - DNA, 312 bp, Homo sapiens
  misc_feature (1)...(312): n = A,T,C or G
gggcaggctgccagcaggagcatggccatnagcccaggctanagaacctgagancacaggggcncggccagggnggaccaaggctacngcatntacccagcatgcncagggnccttnagtggnngngcggagagncctttgctctngtgngatancantgnccnttgtnggaaatgggtgtnctatgactatgccacgcctgaagacttaaagctttgtgtgctgcagcatgcctgtaatcccactctttagaatcttagatttataactaaaatgaggagtcatcttcatattgttgcaaagcaaaaaaaa

SEQ ID NO: 3467 - DNA, 146 bp, Homo sapiens
  misc_feature (1)...(146): n = A,T,C or G
gtgaagtgcacgggacctnagcngttctgccttttccctccacacgcacctcccagaacccngaacatngncctcctgctctgcctcactttaatccttattacattaattngtgtttcagaggacacatggcacacaaaaaaaaa

SEQ ID NO: 3468 - DNA, 207 bp, Homo sapiens
  misc_feature (1)...(207): n = A,T,C or G
gattgggctgaggcctngccggggcgagggccatanttacttcttgtggaactctcagcggangcccagacagnntggccttgttacattgtgcctgaaacaaaagaggaggcgatggcattttgcttgcaccttggatttattttgcttgttatgttttatgcagtctgaaatagattctgngttgttggaacagtaaaaaaaaaa

SEQ ID NO: 3469 - DNA, 229 bp, Homo sapiens
  misc_feature (1)...(229): n = A,T,C or G
tgtcattccagaaggcatccggaggttgtntggcctganaaattcccaaaggttgngctggcnngccagggcagcagacaattcctggaatctacccagnggaaggggagaactgacttctaaatgttgncctctgatttctttccacatacatgcagcccatccacaaataagttaaattaaaacattgaaatagaaattatanaaggtctatttatcaaaaaaaaaa

SEQ ID NO: 3470 - DNA, 124 bp, Homo sapiens
  misc_feature (1)...(124): n = A,T,C or G
gactgaggtgaagtggggtcatgaatggagnctgtgagcagccctacctcacagaaggagctcatgaagagaaatcgcaccatcaggcgaatcagcaaataaacataccactaaaataaaaaaa

SEQ ID NO: 3471 - DNA, 178 bp, Homo sapiens
  misc_feature (1)...(178): n = A,T,C or G
gactgaggagtaagtaagccggaagggtcgctgcaaatttaaggccagtaggctccttacggcaagttcaccgcaaaaggtccctgacgccccagtaccctggtggatgcagagggaagaggattaattcttggctgaactggaggattgtctagttttncagctgaaaaataaaaaa

SEQ ID NO: 3472 - DNA, 107 bp, Homo sapiens
  misc_feature (1)...(107): n = A,T,C or G
gacctgagttcatgcagactccaggacacacgnggtgnacggantgancctattcngnncttctgnggacctctggcccagcccactgaataaacgcatacttgtct

SEQ ID NO: 3473 - DNA, 163 bp, Homo sapiens
  misc_feature (1)...(163): n = A,T,C or G
ctctcaaaggtcggacagganctaaggntgangnnanacatgctgcagcctacnggccccccttcaaganacgtntgcagccgtaagccangtccagccngctgcacganataacacagcctgcagagaaaagactttcggcttaattgagaaacacccacac

SEQ ID NO: 3474 - DNA, 117 bp, Homo sapiens
  misc_feature (1)...(117): n = A,T,C or G
gaagcattctttcatagaaatggntncatcaagaanatctggagaanggtagcatcantaccncatgctantgcnaaagggggaangaanacctcatgggaacccacccctagacaa

SEQ ID NO: 3475 - DNA, 139 bp, Homo sapiens
  misc_feature (1)...(139): n = A,T,C or G
tgggtggttctttaccgcngaaccatctatccnggcccccttctttagagtttaaaccctgatcaaacttaagtttacttcctgatctatttgggtacatgtttatcatcaggtgctcaaatgaaaaaggaagaagaaa

SEQ ID NO: 3476 - DNA, 279 bp, Homo sapiens
  misc_feature (1)...(279): n = A,T,C or G
tgagaagttcattgtccctaaaatcaagaagaaccaattgggagccagcactccttcaaggccccaagcagaagctgccctacctaccacagccagaagtattgctggggtatatgtggaggcctcggggcagacccagagcatctatgctgctataaagcagggcctcctgcccactgggcttggactgactttgcttgaggcccaggcagccactgggggcctcgtggaccttgnccagggccagcttnttcctgngtntgaggccctaaggcgggg

SEQ ID NO: 3477 - DNA, 372 bp, Homo sapiens
  misc_feature (1)...(372): n = A,T,C or G
gaactgaggtgacctttgaaagttaacaggggtgccatgggctgagtaaganaaacggaactgctgttcaaccccgcccagtctggggatgagtcattgttttcaaatttatgaacaaagcacacaaattaagaataatacaagcaagaaacagcagagagacacaaaaggacatagaatccctgatcctcactgtgatctggtaacactagttctagggctggagagagagatgctcagggcaagtgctcttacagagaacatgagttcaattcccagaacccacatggtacctcacaactgcctatttcatacatgtggggcagaacaccgatacacatacttttttttttaanaattgaaaaaaaaaaa

SEQ ID NO: 3478 - DNA, 339 bp, Homo sapiens
ttgcagccagcacatggaagcaactcaggcgctcaggaggctgagaggaggaagcagcgtggacgtggctgaggatggagctcggtcggtcggatgcttgcttcacagacacaaaacaacccagggctgcagagatggcccagtctttaagaacatttctgttcttcccaaggacctgagtttggtgccagaatccacagctggtggtccgtaatagcctgtaacttcaacttcctgtcactccagctccaggggatccaatgccctttcctggccttcctgagcacctgcatacacatcacagacagacagacagacatataaataaaagtaaaaaaa

SEQ ID NO: 3479 - DNA, 203 bp, Homo sapiens
  misc_feature (1)...(203): n = A,T,C or G
ataaaactagaactgcgcatactggagtanccttnctgaatcnngnactaggtnctgnngggtgggacttgactgncctntgantccctgntntcttattgactgggactctgnctggatacttgtgnccaagttcattctggattttcctctatgttagccaataaactaactcctggttggcttcctggcaaaaaaaaaaa

SEQ ID NO: 3480 - DNA, 317 bp, Homo sapiens
  misc_feature (1)...(317): n = A,T,C or G
gactgaggtcggtccatcgagaaganagtcaaggccgaaactcaaggcagacaaggaggtggaagcagaaactatggagaaacattgcttgccagtttgctcgctggctcatgctcaaccagcttccacctgcctaggcacagtgccacccacagtgggctgggccctcctacatcaatcaagataatctcttaaagacatggccacaggccattttgatctctgcagtctcacagttgggactctctttttccaggtgactttaaattgtgtcaagttgacaataaaaactaaccagtacaacatttaagcaaaga

SEQ ID NO: 3481 - DNA, 337 bp, Homo sapiens
  misc_feature (1)...(337): n = A,T,C or G
gactgagccctggctgtcctggactcactgcgtagctgaggatgaccttgaactccagatcccccgtcatcgccatctcctcagggctggctgggattacaggtgcctggcctcacagtagactctgaaactacaaattgaccatgtattctgcagcccccctcccccaatccatcaatactttacttacttacttactcattgtctcttacgccgactagactctagaccccatangatcaaggagtctttgtgttctggccacttatctgtccccagtgcctggcaaagtgttaaacacacaataaatctttaggaaatatggtaaaaaaaaaaa

SEQ ID NO: 3482 - DNA, 511 bp, Homo sapiens
  misc_feature (1)...(511): n = A,T,C or G
gttttgagagtgaagaccagcgaagtaccagtgaagcattgtacacatcgaaatgtaagaacctnctttcactgttcgtggagttccgattacattctttccaaatatcacacaccctctcaagtgtccacgacagcaaaacatcacaggctctcacatgcttcagtaaaacagcctctccccagacagcatccagaaaaacacctcgtgacatgactgagtttccaaagaatccagaaattcccacctcaccctgggggctggagagatgttcagtggatccagggcatcgctgctcctcaagaggacctgggttccattcccagcacccacagggcatctcacaaccatccacaattccaattttggggcatctgacaccctcttctgtcctctgatggcaccagatacacatggtgatgggcagacgtaataaatgtaatcaacacacccatggctgaaaacacaaaattcaattaaattttaaaatgntgagctcttcaaaaaaaaa

SEQ ID NO: 3483 - DNA, 143 bp, Homo sapiens
  misc_feature (1)...(143): n = A,T,C or G
tcaactcttagcacaaatgtgnnaatnaacaacctccatcaccagggaatccagtgccctctcctggcctctgcatgtactganggcatacgctgtaggagnacagacatgcatacgaggaaaatgtccatatgaatatttat

SEQ ID NO: 3484 - DNA, 505 bp, Homo sapiens
gttttgagatgctctggatccctttgtctgcgtggaacgagtctctggggcaggtgggcaaggagttggcggatgacagacagaccaacacgcaagattgtgtagaatctgaatgtattttgtcaggtcgagcatcaaactttttataccgaagaaataacaagaaaccaggcaaaatacaatccaccaagttacagtgatgcaatacataaggaatgcatacatcaaaagaaggcggggaccaggctgctgccgaaaagaagggagccaggtgtaaactggtctattgttaaacccaccaccagggcttctgcactagcagaccttttcatgaatactgcaataacccaacgccccatttcctgggtctacagaagaatttaccaacttgcttttaatgtgaagcttgctatacctagctgtagagaagatctcggtctcagtgggattccctagctctaatatggtattcccttgtgtgggtgagatttgctactgtccttag

SEQ ID NO: 3485 - DNA, 562 bp, Homo sapiens
  misc_feature (1)...(562): n = A,T,C or G
ctgaggcttacaggtggtgcngaagagnctggctcacaactggctacagtgaacgagctgggtaccccaaggacatcttaccagntccagncaaagatctgatctacgtacacctgcgtcatgctgagaccctcaagcctcactaaaagggtccctgcctagttctgtttactaatctgccttattctgttgntgttcccatgttaaagatagagtaaatgcagtattctccacatagagatatagacttctgaaattctaagattagaattacttacaagaagaagtggggaatgaagaatgaaaaattactggcctcttgtgagaacatgaactttcacctcggagcccaccccctcccatctggaaaacatacttgagaaaaaacattttctggaacaaccacagaatgtttcaacaggccagatgtattgccaaacacaggatatgactctttggttgagtaaatttgtggttgttaaacttcccctattccctccccattccccctcccagtttgnggttttttcctttaaaagcttgtgaaaattttaagtcgtcg

SEQ ID NO: 3486 - DNA, 415 bp, Homo sapiens
  misc_feature (1)...(415): n = A,T,C or G
gactgagacaggagcctagcatgactgtcctctgggaggctccacccagcagccaatggaaagagatacagagattcacagccaaacagttgatggagctcaaggagtggaagaaaggttggggaccttaagannacagagactccacagaaagtccaacagagtcaactaacctaaatgcctggggctgccagaaactgaaccatcaactaaagagtgagcactgnntggacataggcccccctcacgtatgtatggatgagcagcttggtcttcatgcaggagcctgggcctgagcctgctgcctgcctgcctgtgaatactgcactccaaaatagacagccttgtctggcctcagtgggagaggatgtgtctagtcccttaggaacttgatgtgttgggtgggagggtgttg

SEQ ID NO: 3487 - DNA, 281 bp, Homo sapiens
  misc_feature (1)...(281): n = A,T,C or G
gaactgaggtatttggccacagcgacatcagagncaagaagagacacagatgagagacaagcacatgaaagatgcttaccatccttcgccatggcaaaaagtgaaattaaaaagtcgaggggacattactgtgcatctgatggagacatgaggacccgtagggcttgctggccagccagtctagcccagtcagtaagctccaggttccattgtgcctgtggtcttcaagagctctgcacacccacagacataaaaataaagttcaggtgaaataaaaaaaa

SEQ ID NO: 3488 - DNA, 443 bp, Homo sapiens
  misc_feature (1)...(443): n = A,T,C or G
catggacccccatgtagatggttgtgaagaatccatatgcccacatcagcattcctcgggctcacctgcgctctgacctggggcagcagttagaggaggttccttcttcatcttcctcctctgagactcagcctctgcctgcaggaacatgtatcccagagccagtgggcctcttacaaactactgaagcccctgggcccaaaggtatcaagggcatcaagggtactgctcctgagcacggccagcagacctggcagtcaccctgcaatccctatagcagtgggcaacgtccatcgggactgacttatgctggcctgccacctgtagggcgtgggtgatgacattgcccaccactgctgctgctgcccttgctgctcctgctgccactgncctcgcttctgccgttgncacagctgntgngttatctcctagctgactattga

SEQ ID NO: 3489 - DNA, 171 bp, Homo sapiens
  misc_feature (1)...(171): n = A,T,C or G
actgaggctgggatgtggcttgctgatcttccantangaccccagtttggntnncaggacggntattgngagataccanaccctttgacctttgaggccatntgcacacccacagcgcacctaaatgcactggnatacattgcatatgatggtnaataaataaataaataa

SEQ ID NO: 3490 - DNA, 442 bp, Homo sapiens
  misc_feature (1)...(442): n = A,T,C or G
gactgagattttgggtttcgctaccttcctgaggagctgcggttctttctaagaagccatcaggtcctgtccctgctccacagatctcaagtctttaaaattaggtgaatgagtgaagctgacttggaatgcagccaagtacaaccaagagccaatttcaccctcacttccaagtagacttttatgctctatcattcatatatatattaatatgaatctgtacattcatatgtatatgtatattaatgattggttgcagatgaatcacttgttggcaactttgtaatgagatacgaagagaaaagtttccagaccattaagatttgacctatgctggcttgccccaaactttttaaacatttggacttcagtcacaagacatggtaaagtatacagttgncaaactccttttgtatgtacctgtataaacctacataacaat

SEQ ID NO: 3491 - DNA, 246 bp, Homo sapiens
  misc_feature (1)...(246): n = A,T,C or G
ccagactgagtgctanatgcaccctcctgaatgaagaattctaaagggacatttgtgacccctctctttgcctgccaaactactgaaataatgaacgtcaagaaattacgggccaggtgtggtggtgtacgcctttaatcccagcactcgggaggcagagacaggccgatttccgagttcgaggtcatcctggtctacaaagtgagttccaggacagccaggggtatacagagaaaccctgtctca

SEQ ID NO: 3492 - DNA, 416 bp, Homo sapiens
  misc_feature (1)...(416): n = A,T,C or G
agactgaggtggggtctttcaccagtagcctnggctgatgagctcgggcaaggacntaccgactccagccgtcgctgaggagacccgttcaagcaagcctccaccgcctcacgaagacccacttccgctcgtncggcaccggcccgcccttctcagcccttattggcctctcccgccttttctcccgtgctctaccggtttaggaggataaattgcaattttattgggtcaagaggactccagntaannantgncaatnaacagcctgtttcccttccanctgcctattnctgagggtgaggncttttccctggnnccaggacttccccacncctcctccaaataccaagactatgggcttaaaagtttcanatgggtgctggagagatggctcancagttaagagcaagcgactg

SEQ ID NO: 3493 - DNA, 383 bp, Homo sapiens
tgagatcctgacattgatttattttctgaagaaaatttaaccagagaagctccagatgctgaagctaccaggcatgtcagggaagcaggatggggaagaacacagagagactgcattaattgtgtatgtgtggtgcgcagggaatctgagctcagatcctcatgctaacacagcaggatcttcactcagtgagccatctcactttaggctctttttgtcttttcatgtattggtcaggtgtctctggccctcctatgtcttctatccaaaaataactgcttcctactgaaaacctctcaattgcaactatgtcccagtgtatttattaggaatgattatctgttttattaaactataaaagactttaaacgtaaaaaaaaaaa

SEQ ID NO: 3494 - DNA, 447 bp, Homo sapiens
  misc_feature (1)...(447): n = A,T,C or G
ctgaggaccctaaggactctgcaatatgaataattctctagcagancaccatctcatttgaagagtacatccnantnaaggcgaggnctgtcccgcancacaggatgaaggaattnctggactcactgncttctaagggaccagaagctcttcaggagttccagcagactgccaccnccaccatggtgtaccagcagggtgggaacgtgcatttatacnnacagcactgaagtggctgggnctttgcttgancttgcttgnncagtcacaaccagtgttcaaccacaaactcagcaagagcagcagatccaggttcagcagccacagcaggttcaggtntaantnaagngtnagtttntnctctccgaatgcnggcactacaaagtaagatcctgagtgaaggnaannagaacctagtcactgagncttctgaccctgagagcacat

SEQ ID NO: 3495 - DNA, 339 bp, Homo sapiens
  misc_feature (1)...(339): n = A,T,C or G
acttgaggcttctggaagagcagcagtcantgctcttaaccgctgatcaggtctctttagtcagtcccccaagcctccacccccgttttttctatgacaacaaaacagtatctttctgcactgttgactgtgaaatgccgggcatttggcaaaggggttaggacaaattgctcagagcagaaacgaaagcatacaggacttgngctacttctcttattgcangctcaaactacttcagagcccaacagtctnggngggctctagcaactgnggccttaatcacacactcagtcatttgctggttttcagggataccaaggacgagggggaaaaaaaaaa

SEQ ID NO: 3496 - DNA, 338 bp, Homo sapiens
  misc_feature (1)...(338): n = A,T,C or G
gactgaggaggtgggagnaatcacttngtcaagagctcctggaaggaacagccagcgggagtngaaacctttttncatttggtctcgaggcaaaggcagagattgctccagcagctccacacagtatgcacgacatcttttataantnttgtttnntgaaanggggtctcacatgtatagctttgggcttacctgnaacattntctngctttnacctccngagtgntgggattaaaggcatgtnccacctatactnancanancagaataacattttcctctgctatttttggttggatattnngaggtntatttcacaagatttttatttaaagaat

SEQ ID NO: 3497 - DNA, 314 bp, Homo sapiens
atcctggcaaagtacccagtatgagagaggatggcagataatcagcagaggttcaacctgttggaccccaacaccaaacacaacacatcaggcgtcaggccgggtctgtgctggtcgtcacctctctctctccagcatccaaacaaacagcactcctcggcaggagcagatgtgggtgcctcccaccattaagaataaagcacttgggaggcagaggcaggcagatttctgagtttgaggccagcttgggctacaaagtgagttccaggacatccagggctacacagagaaaccctgtctggaaaaaacaaaaa

SEQ ID NO: 3498 - DNA, 486 bp, Homo sapiens
  misc_feature (1)...(486): n = A,T,C or G
gactgagattgacccaggcctcatgtaggctacacatgctctgccactgaaaaatgcatctctatagctntcccagaggctntggagctaggtcaagtataagaaccattcaaccatcacagaagtaacggttgcacagttcgtccaactccaaaagcagttccgtcttgtctaagcagtaccacttgaatgcttccataggctggccttaacttgctaaataaccaaggatgangnnagattttggccttaactttgctaaataaccaaggatgacctttgtggagagcagtaccgcgagcaatcgcgtgcatgccggtgagcaatcgncattataaagatggcgctggctttccacttgcgcctaactagtaaacaagccttattgcgcaagtgcaagagtgaactcaccgactatttccacttgnncatnttcgcgggnggngtangaaatgggggtgatgggncgagccaacgaatcaagga

SEQ ID NO: 3499 - DNA, 440 bp, Homo sapiens
  misc_feature (1)...(440): n = A,T,C or G
gactgagggtatggcagctggcgagactggccaaggccctagccagcaggaacatcccagccgttgatccgaatctccaattctaccgtccccagcggctgagcctcaaggaccaagaaattgcccgaagtaggagtaggaacagtagctacctgaagtggaacaagcctgtcccctggctctcagaggtacaatgtcgctgtcttcagacactccagaagtaggagtcagattttgttncggatggttgtgagccaccatgtggttgctgggatttgaactccggaccttcggaagagcagtcgggtgctcttacccactgagccatctcaccagcccacctcttgtgatcttgactagaagtaccttcctaacccagctcttccactgtttttaaataaataaacaaacaaataactcactgaccttaaaaaaaaaaa

SEQ ID NO: 3500 - DNA, 163 bp, Homo sapiens
  misc_feature (1)...(163): n = A,T,C or G
caggggctccttggggtatagngtggagcctatagggcagctaccgtctcttcagtggaactcatggaccagaaagagatttccccctctaccttggcaagaatgnagttggncgaagccctgactgctctgtggccctgccttttccatccatctccaaaca

SEQ ID NO: 3501 - DNA, 279 bp, Homo sapiens
  misc_feature (1)...(279): n = A,T,C or G
actgaggcagggcctcactatacngangtgctggagccangtgtggctcaactcacctggaatctgagcactcaggagtntgaggcangattgccnanagtncaaggccaccctcagctacatgggtctnaaatactnaagagttcactctgcggttgaggatgacctcaagcctctgatcttgctgctgggatcacatgagagctgggattacagcattggacgcgttctcacgaccggccaggaaagacgcaccaaaccanaatattctgcgggaaa

SEQ ID NO: 3502 - DNA, 343 bp, Homo sapiens
  misc_feature (1)...(343): n = A,T,C or G
gactgagcccagcagagcctgaccttgggaggatacaagancagtaggacactgtccccaccgggactcagcgtttcctggaccatcgggaagtgggaccttatgaganggggctggtcacaagcactgggtctcaccatgatgctctggcttgcctcaggctccaagcaaagggatcaggtgatatggatcaaatccttcaagactcgaagcccaaacaaatctttctgcttcttaagctgtttcttcagggctaggctggaacctaggcttgngagcatggtaggccaggactatgccactgaagcacacctccagccccctnactggagggcttccaggt

SEQ ID NO: 3503 - DNA, 394 bp, Homo sapiens
  misc_feature (1)...(394): n = A,T,C or G
gaactgaggcagatgtctctgtgtaacaaccctgggtgtcctggaactctatagaccaggctgcctttgaactctgagatctgcttgcttctgcctcctgagtgctgagattaaagatgtgtaccaccaccgaccagctaacaaataatgttaccgctggggtcagcacggcatgagaaactgcagtaaagggtcagcattaggaaggctgaggaccactgctcccagtactctgttgcttgtaagacgcagccagcagcttacttaatgccttctctacatcttcacagtgcataaccctagcaagaattccgtgtgaatgaagcgtgccaagtctggtttctcaggggtgggggtggggggatgtanagnaaagcaatatcgccacagggta

SEQ ID NO: 3504 - DNA, 332 bp, Homo sapiens
  misc_feature (1)...(332): n = A,T,C or G
gaagcagaggccaccgcccactggcttgctcagnnttgctttctaaagccctntganctanggtntgganccacccacngtgataatcagtcctcccacttcaatnatcaagaaaatgcaccgcagncttgcctacngaccaatcgnagnnacgcctcttnaaccntangtccagncagtagncactggatcctacgtatgggggctgtaagagcaagacaagcanngttcattcgtggnctntggtttagttnatggctctaggttcttgccttgaggtgctactttannttccctgtaacctgtaagccaagagctaatgtaaaaagtaa

SEQ ID NO: 3505 - DNA, 339 bp, Homo sapiens
  misc_feature (1)...(339): n = A,T,C or G
actgaggataggaagtggaattactggtcaangggcnttcagcanctggggagaagtggccccagaagtnaaaccttcagacagncaaacatctgtggcaatngcngatttgnaatggngagaantggaaggagatgactgcggnttncattatgganatggtacaaactgaggcctcangacaatgacttccccacaggtcctganttnaganntcctggcaaccacatggtggctcacaaccatccttaatgagatctgacgccctcttctggtgcatctgaagacagctacagtgtacttagatataatagtaaataaattatttaaaaaaaaaaa

SEQ ID NO: 3506 - DNA, 286 bp, Homo sapiens
  misc_feature (1)...(286): n = A,T,C or G
ttcacaacctgatggtatatcaactccnactattgctctgcagnctgacagtcttgcnnagatactctttatacaaatantagtctatagcctgaagtgtaagccctgcnanggcagganagaaattgnacatttcagactgggcaggggnggcncacacctccaattccaacactcaggaancagacgnngntagatntntggnagttccagagctagcctggnctccagagtgagtnccaagaccctcaggggctanacagaggangccttgtcttgaataacc

SEQ ID NO: 3507 - DNA, 287 bp, Homo sapiens
  misc_feature (1)...(287): n = A,T,C or G
gactgagagggaagatggaaatcaatgggaganttctaagaagacctcaccttcctctaagaagctgcacaaggaggttaccccttatctcaagaacattactcctgggcagtaaagacgcactgctttaatcccagcactcgggaggcagaggcaggctggatttctgagttcaaggccagccagatctacagagtgagttccaggacagccagggcaacacagagaaaccttgtctcaataaataaataaataaataaataaacaaacaaacaaataaataaaaa

SEQ ID NO: 3508 - DNA, 413 bp, Homo sapiens
  misc_feature (1)...(413): n = A,T,C or G
gactgaggagtgtgcccagcacaatnaaccactgtntggaccanagcaagaganatgcattttcttgcagttctggaagccaacgtctgcnacacagcagactccacccatctgtagtatctgtgaagggatcttgcctcagcttccagaagactgcctgggtnnggatncgcacccttcctagcntatgctgagggcnngcctnacatnnggctncatctgcctgtnctacaggangcgttggacntgcatangctncactggtntttnangattcacctgcncaggccctgggattttngggggtgatacttaactgcnccccatntctttagcctcctatactatatnatcaaggatatgacatttttatacccataccattgcacttctngatttatcattggcggtta

SEQ ID NO: 3509 - DNA, 236 bp, Homo sapiens
  misc_feature (1)...(236): n = A,T,C or G
gactgagaatatgaactagttatcaatggccaagcncttgagggtccagatacaatacacagaaggaggctggcgagggtgaatgaacttcagagctcagnangnnagctcccnnctaccgctccagngcgangcctgtctgcccacgtgncgtgctccacgccacggatgnccatgnnctctaangctctgngactgngaaccccaataaactcnntcttttataatcaaaaaaa

SEQ ID NO: 3510 - DNA, 104 bp, Homo sapiens
gactgaggtcccttcttcacagctttttcctagacagctggtaaccaaaggctataatggagttaaaagatggacgaagaaggaaatctggaaaaagaagaaaa

SEQ ID NO: 3511 - DNA, 421 bp, Homo sapiens
  misc_feature (1)...(421): n = A,T,C or G
gactgaggaagacaccttngtagttgnatactctgcttaatattaactgacagtnnagantgaccagcgcactgcgcatggncaagttctgggttctattcccaaggagatggaanaattnaacngccttcantggnaaaagacttcaaaatctnggaaattaaaaacaatacgggaggggtggccaggangctgtttcctgggttaagagtgcttgctgnttcttccaaggacccangatcacttcccagtaccaaaagctggcgtacaaccttttggaattaacccaagctccagggatccacgactttnttntggcctcagtggacagttacatataggtaatnttgaaacgagnnncgtattaaganaatttttaangctgnngncacngtattccacntttaagtccctgaaaaga

SEQ ID NO: 3512 - DNA, 196 bp, Homo sapiens
  misc_feature (1)...(196): n = A,T,C or G
atccacgccggatccttctcaacagtctgttttacgggaacctttantaaccactccttccccgngatgcagntctgaatcctccctgtagcagggggtcttcgctcgngcctgaagatgtttcttgtcccgggtctcagcaccacttgttgcacgcgcccccaactcgccagcaagaacgacgctgctacaggat

SEQ ID NO: 3513 - DNA, 328 bp, Homo sapiens
  misc_feature (1)...(328): n = A,T,C or G
ggcatgtggagcttgaagccttgtgtggcttgtttatggcattcttggacaaacagacccagtgattctttgggcagganctgtatggggaggaagaaagtntggaanggcttncctattanactgggaatggtttnnctntctcngaggtntnaatgangncatttgtaaagncnngatgcctnantgngggagcntgggcattttctaaggaggtcnggacctaaaccatgcacagtncctaggattagaggtncncttaggaancaaaggcacatgacaagtcaggcgtnntgggcatgcgcctagactcccagcatttggaaag

SEQ ID NO: 3514 - DNA, 403 bp, Homo sapiens
  misc_feature (1)...(403): n = A,T,C or G
gactgagtttttcagttgcatttttaaagaggaaggctcatggtgcaaattgttatttccagtacgnnngctgaaggcctgncanaatggntgctgatgganctacngggggagatngaggctngctacagcaccgnattagctgnaaacctcctgggagacctacattacaccacatgagggaggagatgtagtctcccctcccncagcctgaaacctgcttgctcggngnggagnttcctgcnnattngnnctgncacgcccactgctgnaacctgnngagccacacacntncacctttntactgnaccagagattattcggcgggaatngngtnccctccnncttncttnataactggngncacaacactaaaatttgagccttgatcagaaaaaaaaaa

SEQ ID NO: 3515 - DNA, 430 bp, Homo sapiens
  misc_feature (1)...(430): n = A,T,C or G
gactgaggcagcgtggtggccgtaaaatcacagaagaagccagcccagtagcctcaaggacacatcaaggagtgacacacaccctatgtgccaaagtctgctgggctccgaaggctccatttagggacttattaaacaaaaggctgttgtttcaggctctgcccagntctagtcctcctcctggaatttagcaactgtgtgaccttcagcaaacaacccagcctttccgtgcctaactttatctgtaaaatgggaacggngggaatatatcatctctaggattgtatcggggattccatcagctgactttgtttcgttcgagacaagattttgctgttagccttgactggtctggaacttgcctcaaattctcaaagatctgcctacctctgcctccccagtcctggaaataaagtcctatctaaccatg

SEQ ID NO: 3516 - DNA, 541 bp, Homo sapiens
  misc_feature (1)...(541): n = A,T,C or G
gactgagggcaccacctgtctggaaatggatcgttcttactgaacttcgcaggctgcgcagtgtgcagtaagcgggactttatgctgatcacaaacagatccctgaaagaggaagatggagaagaaatagttacctatgaccatctgtgtaagaactgtcatcatgtagtagccagacacgagtatacattcagcatcatggatgaatttcaggaatataccatgctgngtctgttgnggggcaaagctgaagatactatcagtattctccctgatgacccccggcagatgactctgctgttctaagcctcccgtggttctcttgtaactgtgttggcttggtttaaaatagagcaagcctagggctggagagatggctcagtgggtaagagcacccgactgctcttccgaaggtccgaagttcaaatcccagcaaccacatggtggctcacaaccatctgtaacaagatctgactccttcttctggagtgtctgaagacagctacagtgtacttacatataataaataaatcttaaaaaa

SEQ ID NO: 3517 - DNA, 274 bp, Homo sapiens
  misc_feature (1)...(274): n = A,T,C or G
tgagagactgtgaatcctgcaggaatgactgaatgaacccttgattcacggacatgccggaggagttcaacatgggcacacacgactgtcacagacggcagattctgaacctacatcgtgagcggaagatgtagcctttctacaggacgcatccgagatgcaaggcaatacngtgtnatagaatgtcgtaccacccaggacnagggtgtccccggggccgaggaggnnnctggagccagancttcancaccagctttcataccccaaaaccctg

SEQ ID NO: 3518 - DNA, 505 bp, Homo sapiens
  misc_feature (1)...(505): n = A,T,C or G
gacctgaggtggggatgcccactccttcancacntnggcagtcacgagcggagatgctcttgccaggcaccagtnggagctctcggctccctcgtnagggatggnagcccacagtccgnattctgntctcagcactgnnactcgntggcttgaacccgtgcaggccctgancctgcgcccacagcctcatgcgagcacagntcatnaagtcctcttgngtcctgncgacacgcatntcangcctcccactgctttgcttctgagcttggtgtctcacttcctctgaggcccagcgaacccagacaccttctaggaaggtgagaaggcagcactaggaagaccttagatcactttatcaccatttaagctttcccagcccccaaccttcttaatttgcatctaccaaccttgaaacatcttcttaggncctaaaacatgttcttagaccctcacaactcaagcttctatatnctcagaccttaaataaactttacacttttttctt

SEQ ID NO: 3519 - DNA, 317 bp, Homo sapiens
  misc_feature (1)...(317): n = A,T,C or G
gactgagaacatcacagaaaccgacactgagttgggacattggtatgtggggtcacccaagtctgggttcncggtcctgggcacccaataagccctctcnggagcgcctcaggctgctgcatgtatgtggctgcacatacatcttctcannggccagcntggctggggcacagnatttaannccagnacttgngaagcanacacnagtgnatttntgggagtttgaggccancctggnctacacagtgagttncaggatggccaggcctgcaaagtgacagaccctgtctcaaaatgttctaaaaacaggacaaaac

SEQ ID NO: 3520 - DNA, 520 bp, Homo sapiens
  misc_feature (1)...(520): n = A,T,C or G
actgagctttctgttgcccggnctcttgccttgtgaaaaaccaccgcatcgtgttctcaccactttggatggagccattccaccatgtntccccagcgcgatggactgcaacctcctggaatcatgagccacacccggagatgcttaatcttcattgtcaacctgactgcattcggaatcagcctaggagacacgaatctcccttggaatctgcctgttactgccaagaatttccagagagttttactaagatggaaaggtccaccccgcgtgtgagtggcatcttcccattgcctgggactccagactcaaaggagacagtgagctgagcagcagcacccacctctttgcttcctgacttcagacgctgcatgcccaaccaccccacccttctgctgtcatccctgacccaccacgatgtactgngcactctcagactgtgagccacagtaaaccccttgggagctgntttcctcaggcacttgatcacaacaacacagaagtacctgacagagcctta

SEQ ID NO: 3521 - DNA, 160 bp, Homo sapiens
  misc_feature (1)...(160): n = A,T,C or G
actgaggtctggagagaagcaggagcttatgcgcttgtggtcattgctcctgaccagagactcgatgcactggaaatcatgacagggcctctgacctgactccactgctgctccactttcttcagncatctatgttggcatngttggttaaaaaaaaaaa

SEQ ID NO: 3522 - DNA, 356 bp, Homo sapiens
  misc_feature (1)...(356): n = A,T,C or G
atgtagaggccttggnctgtgagcccttctcaaccatcctcctggtggtgacctccaacaactgtctctcaagaaagtccttggcaaaagccctgatccatgtcccctgaggtcttgtgtgggagtgtcctggagattccatgtctgctcaattaattagtgtgtgtatgggttggagagatggctcagccgtgtacacactgctcttccagaggccctgagttcaaatcccagcaaccacatggttgctcacaaccatctgtaatgagacctgccctcttctggtgtgtctgaagacagctacagtgtacttacatataataaataaataaataaataaaacaataaaacaaaaa

SEQ ID NO: 3523 - DNA, 230 bp, Homo sapiens
  misc_feature (1)...(230): n = A,T,C or G
ccacagctgacaggcgatcaacagtangatgctgaagcaaaaagggggcacagcggaagctgancatggagatctgacctcttgctgatcccagctaatctggcctgacccttgtctttcaaaccaagcgctggaatcaagggaccttttanccctgtttgtcaccaagaggatcctggagcagctgcctcctcccataaatagataaaggtaagaaatattcgttttac

SEQ ID NO: 3524 - DNA, 122 bp, Homo sapiens
gactgagagacagacatgaatacagacatacacagatcaaagaaaatcaacttacctcctcaaaggtcaaagacctactactgttttcaaccataggtacaaagacaattgaaaaaaaaaaa

SEQ ID NO: 3525 - DNA, 428 bp, Homo sapiens
  misc_feature (1)...(428): n = A,T,C or G
gaactgagatatatttgcaccacagcaccacatgcattcctggtgcttacagaagccagaacagggtgctggatttcctggtactggagagttgttagccagtctcgcgagttctgggaaccgaggccttntggaagaatggccagngttcaggcgcatccttaaagaaanatacattactgtatgtgtannaatttgcacttgagcacaggantgcatgcagtgcatgctttgcatgctctggngggnatgagtgtatgggagtatgcaccatggcatatgtggaggncacaggncaactctggaattagttccctttccaccttcacatgggttctggggaatagaactcagggcgcanagattgnatagcaaattcctttaccctctgagccatcttgccacctntcttttttttttgaaaactg

SEQ ID NO: 3526 - DNA, 185 bp, Homo sapiens
  misc_feature (1)...(185): n = A,T,C or G
atgaagatggctgcatcaagacagagattaccngccatgttggtatacacactcttgactggatattacgaagctagaagagaaaacttcaagggccgaaacctggagcagtaaacaaaggaatttctatctctggcatcttgcaatgtatttttgaaaagatctattaattttaaaaaaaaaaa

SEQ ID NO: 3527 - DNA, 194 bp, Homo sapiens
  misc_feature (1)...(194): n = A,T,C or G
atttctgagattgtgctgaagcaactgncacctcctgacaacccaaagtatcacagaggaaatgaaaagctgtggactcattcaaagttaattaagattaggtatgaccatggaagacttgtgtatgaccatggaagacttctagagaatcttgactggtgatgtggaaaaagagacccagaagaacaaaaaaa

SEQ ID NO: 3528 - DNA, 173 bp, Homo sapiens
  misc_feature (1)...(173): n = A,T,C or G
gactgaggcggcagggcagcttctgnggcctggccttgcccagnncttggaancagggacttacgccttgcctgctgaactgccgntcngaagcctgacatggagncagtctagccttctcagtaacacagccaagaaagnacaccnttcctctangccttgacattcagtga

SEQ ID NO: 3529 - DNA, 375 bp, Homo sapiens
  misc_feature (1)...(375): n = A,T,C or G
gactgaggtgggcgaancacttacctcncatgcangaagcccccactcatnaccccancactgaaagaaactatgtgtggtggttcacncccatantcttgcactgngaanggagaggcaagaggacnacnagtncanagtcatcctcagctacgcaattcaaggacaggctgnagagatggntcangggntaagagcactgactgctcttccganggtcctgagttcaaatcccagcangcacatggtggctcacaaccatccataatgaggtctgactccctcttctggagtgtctgaagacagctacagtgtacttggatataataataaataaatcttttaaaaaaataaaggacagaccaaggctactgt

SEQ ID NO: 3530 - DNA, 427 bp, Homo sapiens
  misc_feature (1)...(427): n = A,T,C or G
tgagctgatcctggagaagcttccgctcctgtggcctttgatcagtggccaagatgaacaacttggcacagagaaaaccaggcccttggatatgaaaaagatgaaaagaatgaaatcccccagggcagaaaatgttcaaagatgtaccaaagaagacgtggaagcagaatcactaataaagtaattcaatagccggagaaaaatcagccagcttatgaggaaatctgggtgaagccaagtcatccagcatgctaacgttttctagataaagcagtgtctgtctgagatgattaatccttttttaaatgatttaattagttatttaattcntaancagggtctcanctntgtagccctgnttggccttgaacccacancgatntaccgacctttgccttccnngtgctgggattaaaggtgtgccagc

SEQ ID NO: 3531 - DNA, 202 bp, Homo sapiens
  misc_feature (1)...(202): n = A,T,C or G
accctcctgagctgtgtctgtgaggcgtctntacatgagaagggaaganacatcttgnacatgaanancggtatctctnttgtctgggagtcccaggagggaaaggggcagaagagcagccgcctagctcctgtgtttcccagtttctctgcttcccatgtctgcttctgttttatttcattaagaacacatttgtatagct

SEQ ID NO: 3532 - DNA, 421 bp, Homo sapiens
  misc_feature (1)...(421): n = A,T,C or G
gactgagactttagtccatctnacctgtgagtcacagcacatntccnaaagacagtatatnattaagaancagngagngaggtattttgaaaaanttggangacntaccatgagtttaaacacttnaagcaatgccactcctggggacactcaanggtngaaaaatgcctcactggatgtaaaacaaatgcttaaaaatgaaacagagtcagatatcaccgctgatctcagaaagaagctccatcgggctaagaaggagaaattagaaatgacaactaagcacaatgcagaggtngnatnnnttnncntccaatttagccatagctgngttgagnttnaggcgtgtggagnngccacacacttactcccagctctngagagggactaggcgctgtgaatttctgngttctgaccatactga

SEQ ID NO: 3533 - DNA, 464 bp, Homo sapiens
  misc_feature (1)...(464): n = A,T,C or G
actgagtccttggaagtgaaacccctccctggcggctgtcagnacaccaggncaaggcttacaaagaaatnaaggtgatcttctagaagtctccaaggatcttgataaattagttctctggctctaattccgggagtgacggtgagaaagatagagggaaagtgaagagaggagaggagtttgaagatgcatcggagacagcntagnctggaccgcatgnnttctgatcaacccagatgtatgtgcatcactctctgtgcctcggattctgtaatggagagaatgacttactgatggtgtanggacgctgaggatgcgtggagnanctgtggaccatgggtgaattactancttgctaagcctcactggaagacatattctcttctggcccgnagctnangcnggntcatctttgaccananctactgaggacaggacccataatctgccatcagccaccacct

SEQ ID NO: 3534 - DNA, 487 bp, Homo sapiens
  misc_feature (1)...(487): n = A,T,C or G
actgagcctctcctacagactcctgaccgaggaatggcctcctatcagggatgtgatggagcttggcaatatctggagggacacgcatggagcagtgatgtaggaaagcaacaccagctggatgagctgacgcaaccttggtgatcaatggaggactgaagccccagccacctggctggctctcacattagaggagttagcatctgaactgagtcctgagtccaaccacatgtaccagtcagtgagtcaccctgtgtggtggtttaaatacgcttggcccagggagtggcactgttaggaggtgtggctttgttggagtgggtgtggccttgatggagtaggtttgtctgtgggcgtgggctttgagaccttcctcctagctgcctgagaagtcagtcttctcctantagccttcanatgaagatgnanaactctnanctcctcctgcaccatgcctgcctggatgctgncatgttcccaccttgat

SEQ ID NO: 3535 - DNA, 502 bp, Homo sapiens
  misc_feature (1)...(502): n = A,T,C or G
ctgaggataacaaggaccaggagctggtgtgtagccagggaaacagctgatggacaactgagaactagtgaggagctggagtggagcctcccacctgcagtcccagcgagaggagggactacagttattagacggatcatttagaaaatgaagacttcatttactactgtgagaaatgttactagactgcacacacaagccctgtgtgcttatgttccaatcctcttctctgcagcacnnagnggttccttgaacatgctacaaagtagaaaacggagcacacagagctcaggccttctgcacaggcttctgtaaatcacatcacactctatgtgctgaagtcgaaaaccaaaacaacaacaacaacaaaaactttctgggtgcaggggagatgggttcattgcttaagagcatngtctccccttgcagcggggaccttggnttagatcctagtacccaggagnangctcacancccacttgtaactccagttccaggggga

SEQ ID NO: 3536 - DNA, 373 bp, Homo sapiens
  misc_feature (1)...(373): n = A,T,C or G
ggcctgcaggcaagagatatantatcggctatcgccacacatgtccacacaancatttggtcatagngnagcttcagttgtcatcttgacaacttagggtgaggaaacctcagttgngaatttgcctccactggcctggcctgtggctagctagatntgngaggtagttcttaattagagacagccaggcctcagctgcagcaggaggaagcagaagggactccaggagaaggtctcagctgcgcctctcttagtgaagtgaaggatcagcaaaggctcaagacccacaaacgtcgcacagctaactttataagcaagccagctctgcctccgtcactgcccacccagtccttgttataagctcaccgaacat

SEQ ID NO: 3537 - DNA, 373 bp, Homo sapiens
  misc_feature (1)...(373): n = A,T,C or G
ctgagctgcacctgtggaagtctttccttgagctttcagctgagcctcctgtagccccaaggaatcccagtagactgctggtccacagattcaagatgccgggagagggctgcctttgcagtccctcgcctcagactctagtgatgttcggcggccctttaacagcctcttcctggaagcaagctttaggtcccagagctggccttctccgggtccatctgccagctaatatttaacccggcagcactgcgacattatccacacaggggaaatgggggtgggggggcattatccccgccttactcctggngaaccgacctcttcctaaatccctttcatgtattaaaagatcataagaatctaaaaaaaaaaa

SEQ ID NO: 3538 - DNA, 419 bp, Homo sapiens
  misc_feature (1)...(419): n = A,T,C or G
gactgaggtatatttttctgcatacattcttatgattctgcatttgcctggtgtccatggatgctcnaagagagtctgggatcccctgagcctgganttacanatgtttggaggccactatgtgggtaatggggttttancanantccttntggaagannagtagngttnccatntnctgaaacattnatgaaccagcctgcctnngtnttagnaaagagcaaccatntntttntttcaaaagggtgttatnaccattggncaaccngacntttgtctgttataaccaccagttgctatgaccaccttgttgngttgngcttntatagttctacctacttgcctatcaaatntcctgtttggaaacccctacccctgacctatacaagccctnattttacacatgtccaaggctgacat

SEQ ID NO: 3539 - DNA, 338 bp, Homo sapiens
  misc_feature (1)...(338): n = A,T,C or G
aaggacagaaggcactcacgactcctgctccctggtatcactgntgcagaccatgagtcnactctgacttgacattgngcatcaaagccctcatcctggaccatggtcatctctgtggatcacaccactgtgtggtgacgaccgctcagaggaagcctntaggcntggtaacatgtcagagcctcctggcacacctgatgcccttgaatcagcctgtntntaggtcctacaggaagtcaagatgctagcctgtgtcctgtcttctctacagcttcaaatgagccttcattattaaggtagtaaaagagaggaggaagaagaagaggaggaggaggagg

SEQ ID NO: 3540 - DNA, 140 bp, Homo sapiens
  misc_feature (1)...(140): n = A,T,C or G
gactgaggcgggccccttctttgaggcaaacgtgatcaacatgggagtcacacgacctggaantgngttctnggtctatactacttgtcanccgatatccagggctacattttagaagaagaagaagaagaagaaaaaaa

SEQ ID NO: 3541 - DNA, 186 bp, Homo sapiens
  misc_feature (1)...(186): n = A,T,C or G
gactgagtctctggcatccacacctgtgatgtacctcaaggcctgctgatgagattctgggacaagcaaccaaaagccagcaaagaaaaggnttnatnnnganttcncaacttgcgtgangaanctgaagctttatgatgngntcatggcagnctccactgtcgatcaactgctacactgctgttc

SEQ ID NO: 3542 - DNA, 407 bp, Homo sapiens
  misc_feature (1)...(407): n = A,T,C or G
gactgagataaatgcagtcttcgccccctcatcgaaggaatttctctttgcaacagacagagaccattggagaaagcaccaccaatcaaaatgcagagctgtgancccatccacggcggatacatctaccaaacatccccacacataaggctcatggatccgttgcagaagaggaccgtgagagtcagggatcggggagtttgctgtgagattgtgtttcccaggaacattcgtgtgttgatatattaatggcgagaggttatcatcagtgctgaagaatgcctctcacagccgtgcctctgtatctatgggtatacacatctatctagtgtatctctgtagttatgtccttggagccactgagaataattacatttatgttttatacattaaaattacacacctca

SEQ ID NO: 3543 - DNA, 519 bp, Homo sapiens
  misc_feature (1)...(519): n = A,T,C or G
gactgaggaaaacctttaagttatacaaccgcagcacatcaaggctgaaccggacattagcagttaactgtgctctgtagcctgcttcttacaagctaaaacaggaccggagccagaaagagtggaactagaaccctgattcctcggcttcataaccgctggacaagaaaaaagcagacaacagaaccaaactggaccacctccggcttcaaatagtcaggaacggtgaacaagatccaggtctgttntctgccggcttgcacaataaggcagttatgaacccaccggctgtacctgtcaccgtgatacgtgtgagcagccactgtgtcgaaaagactctccttctaaattcgtgaaaaacaaacgtggatgctgattgaagtttagcatcatctcccattaatgctattacggcttggttatttgcaattcccttttgtaaatccgagggaaacatcattgcccaaattagctcttttcactcaataaaggccattattagcattctgaaaaaaaaaa

SEQ ID NO: 3544 - DNA, 507 bp, Homo sapiens
  misc_feature (1)...(507): n = A,T,C or G
ctgctgtacaaagaagttaaatagctatcccaaaggtcatataangtcntatttgannacacccatggaggntgagganncgtctncacngancnaananggttctcntgccncctctcagtgcccaaggcgcggnatacttttcataatggancatanagcacgatagncnnanaccgnngncacttgtgacttgnttcctaattggatgcactgaaggaaggcaaaagtagtatcngagaagtgatngncacacatacnaacgcagcaaatataaaactagagcaggatgatgagacatctgagannagtttctacccaagtacaaatacaatgcaccagactatccccacagaaccaaattgtactaaacaaggngagcacacagagaacattaatgggaaacgtacaccctgctcatattgctggtaagaaattacatangtgtgatgagngngggaaatccttcaaataccattctcgncttgntcaacataaaattatgcc

SEQ ID NO: 3545 - DNA, 262 bp, Homo sapiens
  misc_feature (1)...(262): n = A,T,C or G
gactgaggaagtctagattatgaattgagaagannntgaggancagaagattgaacgatggaaataacgacgtggnaatgtagcttagaatagcagttagtcatcaaatgagtcacgacttcaaactaagagtctgtcatatcactgagtttcatgctaatttttacttgaggattgaggaaaaaaacaagtggtactggtttgatatattatcctgatatcaaacaaagaaaactaaaacaaacaaacaataaacaaaaaa

SEQ ID NO: 3546 - DNA, 139 bp, Homo sapiens
  misc_feature (1)...(139): n = A,T,C or G
gaactgaggaatcgggagcccaccgccagctgccacccgtngnagtctcgcnatcnacagngatgtgacccacagagtagcncanacgtagacgcngactgcctgggttcaagatgnntccgccatccccacgggtact

SEQ ID NO: 3547 - DNA, 523 bp, Homo sapiens
  misc_feature (1)...(523): n = A,T,C or G
gactgaggagagttggatgaaggcccccatgncctcctctaggnaaacngctngatncctttgnanggtnnatctaacgcttgnaggccgnagccncnnaggncccaacngcactaagnaggacacccnnntgagnctngctatgnaaggtcntccattgacctaggagatgacatcgagtanctctaaagtgnccctanancnctagntatgtcaccttcttccgtncgatcngaaaggccctggagtcaccagagtttatatggcaactgcgtatatcctgtaaagagagccggtgaaggaagacatgtccatggncacacttgtgccgtatgctgggaactgtgnggagtgtgatagaccctgatcccagcctgctggaaattgctcatctctagacagaattagctcctgagagcctcngttccagacctgccactttctgcccaccagcttctaactctgcaccttgctctctgnagnactaaaactcgaagcatcctccagttccagcttccattaa

SEQ ID NO: 3548 - DNA, 124 bp, Homo sapiens
  misc_feature (1)...(124): n = A,T,C or G
aagctagagcaagaggacttggctggntaccaaaanccngatcatgaacangatgaggntgaaacttnntntccatntccaccttcggcctagacagatanngatccngctgaccctgaacctg

SEQ ID NO: 3549 - DNA, 160 bp, Homo sapiens
  misc_feature (1)...(160): n = A,T,C or G
aggtcacacttgggaaaaactaagtcatggcctcnagagaaggccaggcactttcagactggagagacttggagaaactttcttgnntctgaactcctcccaanacctctatgaggctggcttgcctaagcacttggaagatggaggctagaacccatgg

SEQ ID NO: 3550 - DNA, 157 bp, Homo sapiens
  misc_feature (1)...(157): n = A,T,C or G
ctgtctcccagcagcgaganggcagacagtncnaacttgntccctacgataatgngngcctaatgaaaactgttgataggacaaagtcacattctttgctgcaagggaaaccacacactgcaggaaccatggactgtgtcaccagattaccaggagt

SEQ ID NO: 3551 - DNA, 236 bp, Homo sapiens
  misc_feature (1)...(236): n = A,T,C or G
ctcgacacccgaggatcgnaagttcctattcangaanatcntatnctctactanngnnnnggaacttgtctgacctgcaggnatgcaacctgnnnggggcgacntanaaactatcctgagccaaanactgaannaagccttatgtggntnccccaaagagaagcctttgtattcacccaaagtctgtccaccccagatgcagctgcctttataaatcctcaccatcaaaaaaaaaa

SEQ ID NO: 3552 - DNA, 167 bp, Homo sapiens
  misc_feature (1)...(167): n = A,T,C or G
actgagatgcttgcacctgaatccggtgccctcctaaatgacagtgtggctcagcagtcggtactacctgtcacatgattcaggcttggactcccagaagcagtgacctgcccccctccccccactcggtttgctggaggtactntgacctttcttttgagcacaaa

SEQ ID NO: 3553 - DNA, 265 bp, Homo sapiens
  misc_feature (1)...(265): n = A,T,C or G
agcctcccttgctttggcaggggtnagcagttagtgcttctcctggtgctcacagcacagancagacctgcacacnncnnatcaagtattttctcataccagccagcaaagtcaagacacgaagaactacatccaagacagnctgctgaccttcacatgcacatacgggctcacatacccacccgaaggcttctattctcaagcccacgtgcacaccaacatcccccaccaataaactgttcttcagttactagtaaaaaaaaaa

SEQ ID NO: 3554 - DNA, 203 bp, Homo sapiens
  misc_feature (1)...(203): n = A,T,C or G
gactgaggagagatattcctctcacttatattggggaggagggtctacaacacaatatccttctttaganagaactatganaacctgtcaaagaagaggaggaagaagaggaggatgagaaagaggaggaagaggaacttaatttaaaaataggtgaattatctgaagagatatccaatgaagagatatagtcaaaaagcaag

SEQ ID NO: 3555 - DNA, 161 bp, Homo sapiens
  misc_feature (1)...(161): n = A,T,C or G
ggcaacagatgctgctggactatcgtgttgnagaactnctggtnganaacctgagagtcgcatnctggntatctgcnggccaacgcgtttgcattttttgggnaaccngtggggaggactctnacnctgattanngctgacaccttgggacattacccaat

SEQ ID NO: 3556 - DNA, 143 bp, Homo sapiens
  misc_feature (1)...(143): n = A,T,C or G
tccaccccaaacagctgcntncacggagcacngaagactgngggttgncngagcgcannagctccttaagccaagcagcacagcnccctgncaaattcttcctccaccaccaaaggccaatattnnacacactgctaggcgag

SEQ ID NO: 3557 - DNA, 506 bp, Homo sapiens
  misc_feature (1)...(506): n = A,T,C or G
gactgagagctgccaggtgctgttaaatcagctgngaggaaatcacaggcatccagganncttcctttcttcatgaagcnttannggctggnnaccaaacccancttaactgccngncnctgaancannatcccacatgtaagggcgtgnnagcngactctntttntataccaggctgcaagcataanaacaggagccaactacngggcaggcggcnagnccnttccngtanaaacttggaaggagatgnaggnaatgtacaanagngcttttangananccagcatccatgcgcatngtatccatatgggatcctgagtggnaccaacataccnaactgtaactccanaaggaaacttgtntggctcttaccangggatattcttaaggattggnggatanattttgaaaaagatacattctgaatgttacccaaggaaatggnagcacaccctagcttttaaatagccagcaggtataggccaggatagataaaaccatgggtt

SEQ ID NO: 3558 - DNA, 535 bp, Homo sapiens
  misc_feature (1)...(535): n = A,T,C or G
tgatcaaaggtaggggaggaagatgcctaatacgacatgtgtgacgtggacctggttactantaggtctttgggacgattccagncttcaatgtcagcngtccagtccacctgaatcaccagcagcctgcagaatccgnaggaaacttgnaggctctgccgatttggcanaagtccattgaagctggcaggaagcancatgaacacctnttgaagttctttggtgcatatctctctatgaagtcaaaatcaaccaatgctacatgtccccagcanagattagtgtcntgaagcccaacaaagaccagcagagcgaaccagtgccaaagtgttgtccactctntgaacatcatctgtcctctgtagcatctgctccagccaagcatcacgtgccctttcaccagacagcttccagaaaaacgcagaacttcttcttacctgtctgacccgcagaacatcacatggttctccaaggaaaccagaaattccctnttcaactgacaaaaagtgcaattgtagctacaaattatgggaga

SEQ ID NO: 3559 - DNA, 131 bp, Homo sapiens
  misc_feature (1)...(131): n = A,T,C or G
ttagtttttgaggaaaccaaaagcacgtgtttgctttcaatcaangtgaaccgnatgccatggagtgtcatacaaagtatcacanatncaggngagggtgtgttnccattgtattctcctcacaaaaagcc

SEQ ID NO: 3560 - DNA, 126 bp, Homo sapiens
  misc_feature (1)...(126): n = A,T,C or G
gacagcagcaatcctttctgntacatttgagggccngtgccanctcataactccacacacnttgctctnttgtnatnanacacnttgcacgtggatgccanactccanacatattgtggaaagggc

SEQ ID NO: 3561 - DNA, 233 bp, Homo sapiens
  misc_feature (1)...(233): n = A,T,C or G
accaacaccctcttctgtnttccgccggacaagcatacacagnacatacatgcagatnnaacacaagngcccataaaatagatanggnttnnctagccnnannctcattcatccattccattngggatgnaatgacccctgccttgnaattngctcaactngnctgtatagatggggtagggagggactatgcgccagctctccgcanantaaaaaactatttccaggaccaa

SEQ ID NO: 3562 - DNA, 177 bp, Homo sapiens
  misc_feature (1)...(177): n = A,T,C or G
tctgctaccaacccacagaaccanatnaaaaggaaaanggctgcnaacacccactatnttnctagnnanaaaactntttaatacttntgttttgccctnttagcctcancccacctcctggagatgactgataaaaccaggctaagcttcttgattaaagcccctgtctaaactgga

SEQ ID NO: 3563 - DNA, 130 bp, Homo sapiens
  misc_feature (1)...(130): n = A,T,C or G
agactgagcttgtgagaagtctgttccgnctatctggntttcatcttggttacaagtggatgnatttttaaaattttaatctctgggtatttattaaacatatatatccaaggcacttataaaaaaaaaa

SEQ ID NO: 3564 - DNA, 351 bp, Homo sapiens
  misc_feature (1)...(351): n = A,T,C or G
aactgaggaagttgtgacatttgctntagcacagtatgaactttganggcattanncccnctgatntaatccagtngacaaantagacanntgtngtnatcacacttacaataaggngtagtgngcntgagctgcaagtgccnactgagtgcanaagaangtgnnggatctcctgaaactggagntanacggtgcttgtgagccacctgatgtnctgagagcggtccttangcctctgcaatagcaggatgtnctatgtaatgcctcatantgacttttgnttanacaacaaattatttttttaagatatttacacacatannagatattttgaaaattcaaaaaaaaaaa

SEQ ID NO: 3565 - DNA, 472 bp, Homo sapiens
  misc_feature (1)...(472): n = A,T,C or G
gttcatgtccaggcgagcnagcgtcgngaatactattcntgggggttaganttcccgnccgnagnaagatcgtancttgnatatctcaanggcggaagcntcaacatcagcaagcatagacaggagngcccccttggaaataggtcttcagcgggtctactcaagacaaaagagctgcagatnangctttagcngaagcaaagaaaccacggactgaggatgaagagtgtgtgcgccttgataaagagagantggcagctcgtttggaagnccataaagaagggatcgtgcagacttgagcncagtaggctctttgtctgaagccatgtcagnggaaaaaattgctgcaatcaaagccaaaattatggctaagaaaagatctactatcaagactgatctagatgangatataactgccccttaaacagaggagttttgnggatgctgaggtagatgtgaccagagatattgc

SEQ ID NO: 3566 - DNA, 132 bp, Homo sapiens
  misc_feature (1)...(132): n = A,T,C or G
gcgaacataaccaggaccatnatgacaccatgttgctgncanctctgtgcttggaancctagagttttcnaganantntgngctgngnaaggtganccatctctatagcnggcgctataaaacatcccaagc

SEQ ID NO: 3567 - DNA, 102 bp, Homo sapiens
  misc_feature (1)...(102): n = A,T,C or G
atgcgctatatacaggaaaggcttcctggnaanagcntttanaggaggcatcctgtgctccgtccagngnccgnccngccagctagagaggatccttgatgc

SEQ ID NO: 3568 - DNA, 122 bp, Homo sapiens
  misc_feature (1)...(122): n = A,T,C or G
gcaccaggtgccggtccnagtgagcnnannnacaaggacnctctnnagaggtaaggtcntacaacaaagttttgantcataccactcccatgatgcccattatataaagaaacgaaaaaaaa

SEQ ID NO: 3569 - DNA, 129 bp, Homo sapiens
  misc_feature (1)...(129): n = A,T,C or G
acatttctttgggtctaatctntgtggttttgggcgggcctcacgtnaaactctgtgagtgcgcgcgagtgtgtgcaagtttcccagtaacaacgcnatcgcagncgcagcanagagctgatctcaata

SEQ ID NO: 3570 - DNA, 116 bp, Homo sapiens
gactgagggacgacgacgggttgagggattggtacttttattttagtagatgtcgaagactggacaaccgtgaggctatttttcctgctggctatctgttttcaaaagaaaaagaa

SEQ ID NO: 3571 - DNA, 301 bp, Homo sapiens
  misc_feature (1)...(301): n = A,T,C or G
gaaacacgcccacaaatggaaggagagcctgangttgctctcaaaagaacacgangccgggctggaggcagcacacctgtagactctgcctnagggcggctgnancangaggatcccaggttaaggccatgcctgnaatgcatatcgagttcctgtngcccgatgcgttagttanttagttagagcattcatttaaatcagctgaataggatagatatgtagccatatcttgggaattatctgggcattcaatgaaacatacaaaggacacatcggtttgtgtttgtgaaaaaaaaaatta

SEQ ID NO: 3572 - DNA, 316 bp, Homo sapiens
  misc_feature (1)...(316): n = A,T,C or G
gactgaggaaatgctanttaatggttaagctcaccgcactccancancancactggcatggagncaaancagcangnactgggctgggtgaccccaggnnagccttacacggtgaanaggatgaagaaggcgaccgtcaaacataagcatcccacaacctcagacaggataaaacccaggatggcncanaanaanacctgntgcttgagagacgggttcctagcatanccgatcatcaagctaccaaacacagtgcccatgccagctcctgatccanccacaccanctgtggtggccccagcacaaataaactcgg

SEQ ID NO: 3573 - DNA, 240 bp, Homo sapiens
  misc_feature (1)...(240): n = A,T,C or G
ccttcgccatgtctcancgtntgctctgnntccgagnaggcctnactnttgaggacctannnggctgggtcaaaaatgtactaattttncacaaaaatttgnagaacttgatggatgaaacanaaggnntnacacatgcaanaccagtgagcttactgagttatggatgtantctacctaancacagagcacntttttaattgtatttgaataaatcaacacacatttctatattgtacg

SEQ ID NO: 3574 - DNA, 541 bp, Homo sapiens
  misc_feature (1)...(541): n = A,T,C or G
actgagatggtggcagagtgtcataaggggcagtgtccttttcttaactcggcacaaaggtactacatggaccagctgcagctctggccagaagcctggcgatctggtggctccggctctcctaggtggcagatgggaaaccaagngacttgagacaaaatgaggttgtcctcccatccttctgccacctccatggggaaaacatggcctggctgggacactggctcctgaacagcttttgggcccagggtataggacacagtgggcaaaggcggctgatcggcaagctcatacctaagtgtttgctgttgtcccccactgagatggtacacaatgtanagtgtgactgcgtaacgaccaagagatatcacgttggccccaggaccaagcagggagagaaaggatgagcaaactnttagaggaggattggaaaaggagcctggattctgcgtgggtcaggactcccaaggaaatccacctagagngacttcccgtgtgcagatagacttgggcaaggcctgcctcctttggataagagctt

SEQ ID NO: 3575 - DNA, 285 bp, Homo sapiens
  misc_feature (1)...(285): n = A,T,C or G
gagagctgcacacgtagactcggtcgccgnggtcangatgtctccgccatccccanggtacaggacgganggattggnntccacaatgacccggatcccactgccagccgntccancaggtcacttgcgcgctcgctgatggnttccaggtngggnctcngagtncttcaaagatggagaanaactggactntacaggnttcacacccttcangggcacttnngagggcnaanaccntttgccccaggactggngnacntgaacaatggttgaaagtcagggttt

SEQ ID NO: 3576 - DNA, 132 bp, Homo sapiens
  misc_feature (1)...(132): n = A,T,C or G
caaacagccaggctgcgtcctgnggngctgctggacctgcnntnacacacgganttcaccgaccatnagccttcatggagtggtacaagggctnactnanggactgccccacgtggccacctgactgtggac

SEQ ID NO: 3577 - DNA, 516 bp, Homo sapiens
  misc_feature (1)...(516): n = A,T,C or G
ggccgccacccacagctgatgtcncccacngagagtgctcactgtanacgcggacgcngcaggatcaanatgnctcngccntncncactgggacggacaggacggncggactccacaagatcccacgccngcttccactgggtacacttgctcgccggccatgtgntganggttggncanagagattttcnccnagtaccacttgnaacgccagaggtacatnagntttttctntgcccaganantggattnagagggggnctttagactgtgaccanntttgcgctgcngaggggattgaggnggtttaatgattattaccaggnctnnnnntctgannganatgnctgnctctntnatgacggtgcngaagtgtanaacaggcccctacaagttaactgtcccctgatctccacacagatgctgtgcacatgcatgtgcacatacaggataaataactgcatgggtgtgatcaaacaaatgaatgaataancangcngaatcacaaaaaaaaaa

SEQ ID NO: 3578 - DNA, 393 bp, Homo sapiens
  misc_feature (1)...(393): n = A,T,C or G
ggagcttttctgaagantctntttcccacatgcaggtctcccactgctcagccagtgctgctcaccntgtgaatganaacataanagccntggntgatgaaaacagagganantgtntncaaggatccagggnagccttnnntcagattgaaccanaaatccttctgtnactcanaaaataggtcctgacacttgtgacaccagagggtangccatttcctgactgnttgnaattgnatcacatgggatntaaatntggcttttaantttggaaaccttgatgggnannttgaataagactnccaggntanattcctganananagatttggagaagaacattaagaagaatgaatgcttctgtggtaaaangctcccaaggggcctgttaaa

SEQ ID NO: 3579 - DNA, 203 bp, Homo sapiens
  misc_feature (1)...(203): n = A,T,C or G
ggggagattggggggggaggatgggggagggggatggggggagngccgatggcggaatggtggantagngggaataagcaaaaggagaattgtggatggggngngcgcnaannggannngncgngggtgggncgtgtanggggggcaggcgccccanagcagaggagngagngtgtgtttttgttcgttttttttttttgttt

SEQ ID NO: 3580 - DNA, 394 bp, Homo sapiens
  misc_feature (1)...(394): n = A,T,C or G
gactgagtgtacagccctgtcgcactganccatgccctacnaagtncatcancagttantattctaannncgtcaatgcaaatggctgncagcaganccctgctcagacagtttgggattgagngtnactgncaaggatggagattctggaacgctgccacctctgtcttaacgctganagaagtggaaccngaattaggaaccatnaaccgnaagtggagccggaaccggaagtggagccggaactggaactggagccatggcctgtgagaggacctggagtcagggctccgagttcattgctttatgcactacagataatgaagtcacagttttgaccttggtttcccttttctttatgctttggctnccaaaaataattttatctgaggga

SEQ ID NO: 3581 - DNA, 250 bp, Homo sapiens
  misc_feature (1)...(250): n = A,T,C or G
gactgagcccgagccccctggaaattctcatccctgcctttgttaaacagacctctgaggagaagcctaaagacagtgaagaactggagtattttaaccacatcagtattgaggattcacggagtctatgagctgacaagcaaggctgggcatgttgtcatccatatcanatcctccatgagtgccttaaaagaaaccatggaatgggtgacacatccatcaagtttgaagtggttcctgggaaaaacca

SEQ ID NO: 3582 - DNA, 264 bp, Homo sapiens
  misc_feature (1)...(264): n = A,T,C or G
aagtccctattcatctagaaagctnanganngttanagncnctgcacncntnnnagntngncanacaggnaaaaatgatcaanaacnaggnggatatgcaggtgcttcaccttttggggcccaagatggaagctnatctggtgaanaagcccaaggtggcaaaggcacggctggaagaaacagaccggaagacagcaaaagatgtggtggagaaaggtgaagtggctggccanaccctgtctctgatggagcagctccgggggg

SEQ ID NO: 3583 - DNA, 232 bp, Homo sapiens
  misc_feature (1)...(232): n = A,T,C or G
acagccacggctggttccatatactctacaccaataanggaaatgtnanagancnctggggatggcagtagcactaatatgaanacaacctgcatctctgaagacctcatgggagagggggcatggtggctctgcccgctgnctnancattnggnaaggggagacagatntggaccctgatntatagnncngcctgggttacacagactgncagtcacagccacccaaccta

SEQ ID NO: 3584 - DNA, 294 bp, Homo sapiens
  misc_feature (1)...(294): n = A,T,C or G
actgaggacagcctctggggtatcgaagaaccgtcccttncanatgtggnctcctaccgccanccantggacccgngatgagccacggggctgncgtttatctgatctcttgaagagttaaganactgcccgcgcaggcgccgcgaagggcctctatagtgntccaagatggacctccagcctcaattctggtgtcgtcgtgcgcaggtcagtctcggtgcccgttctccataaagtcttgtattggggctcaggcaaaagcaacaacttggaaatattagaagcaaaaaaaaa

SEQ ID NO: 3585 - DNA, 106 bp, Homo sapiens
  misc_feature (1)...(106): n = A,T,C or G
ttaagataaagtctcagactgangccagagaanattntgaacttattctattcttactcgcatntccctggcacttgagatcacaggngaccactaccatgcctgg

SEQ ID NO: 3586 - DNA, 121 bp, Homo sapiens
  misc_feature (1)...(121): n = A,T,C or G
aacctcggtgaatctattcccagaaagggattgtgtgtgacttctccttttaaaatnatngctttttgtttatcatactttggggatcaactaaaatcatgagggggggaggtcattttgg

SEQ ID NO: 3587 - DNA, 156 bp, Homo sapiens
  misc_feature (1)...(156): n = A,T,C or G
gactgagctcgcagtccatggcaatactctgcgcctgagtccatcaccagggagtcctgtcagcctacccctccaccgtgaagaaagggaaaccgagcccaacttcagtgctttatttgaataccatanttaatgaatgaaatattcattagtaaa

SEQ ID NO: 3588 - DNA, 370 bp, Homo sapiens
  misc_feature (1)...(370): n = A,T,C or G
gttggatctcctggaaacatgaatcacagaaagagtttccctcccacccatggactgttgggctgttaccagctttcccatcacactggatgaggtgatctgggcctcttcatacaggtcttctggagaaaccagaaatgtacccattcaccattccaacagccatgaccttgatgatgacctgtatcccttcattgctggataatcttccccactggaaggatgcaaatgggaactcactgtgttcacttggagcttatgtactgtccanaggtgttttacagctgtgggtagtttggcggggcccttgaggatcgaatgaaacacagtatacctctgaagtctcccccagttagcactgcattatcct

SEQ ID NO: 3589 - DNA, 109 bp, Homo sapiens
  misc_feature (1)...(109): n = A,T,C or G
ggctccatgcatgctaactanctctgagacnnaaaagcattgtaccagccaataaccacaggagcaaatctaatctcacagnaaatgattttcaatgcaaaaaaaaaaa

SEQ ID NO: 3590 - DNA, 237 bp, Homo sapiens
  misc_feature (1)...(237): n = A,T,C or G
tcccgcaagaaacccttgcctntcncagggggctgnccttnctgccncctccatatactttgnctttnggtattagcctctatgctcnatgatncatgaggactcagggaanacctnaccaggcctngtaggcgacattnagctntnaataaggcaccctggatgaaaggcatgtattaacaagtggattaaaggccttaaaagtgaaggaaggaccaaacacacacacacacacac

SEQ ID NO: 3591 - DNA, 238 bp, Homo sapiens
  misc_feature (1)...(238): n = A,T,C or G
aactgaggacagaatacggagaccaagnntgctgagcgacctgtgtagccatgacaggctgagccaggatctgaaccaaggcaggtaagctgggtgtatttctgtctcctgtaggctggtccaaatttactatgtaccctaggctaacctccaactgtctgagtggcntctcggctcattatgtagcccaggctggtcttgaatttacaatataactctgcagttgtaaaaaaaaaaa

SEQ ID NO: 3592 - DNA, 199 bp, Homo sapiens
  misc_feature (1)...(199): n = A,T,C or G
tccccgagtccattttgcaccgnctgcagcccggccccaggttggctgtgnggagngntctccatgttttaccggctaaacagtgaggtnantacaagctggnnctctcnacanaatntatagaccgtttgcctnaagcatatactangcctggaacngaggcnaaccgtattgtttttntttatgtgctggtatttat

SEQ ID NO: 3593 - DNA, 522 bp, Homo sapiens
  misc_feature (1)...(522): n = A,T,C or G
ccgagatggtgctcatttttacnacngcactcgnntggatanntnttcnncctttttatngccgngggctagaaaagtgactanagcttctanncaacnngacgcgtgttttccctttacccttttgcaccatngnntaagcctaggacctgaangcggacctnntcnaccacccgcangatgggcngggattntgagggnccattgccaaacantgcagntntttagcttcaanctttggtgcngncagccancncaaaggatatgttaaagangacagctctgcattgggncaacagaacataatcatcaagagggggngggagcttttaatcaaaatatgggngctgangnacacacgcaggagtaaatttttgtaaanctgcatttngatatttncaatagaacaatggaaaaggangantttagccagagatnttaacagganttggcttatggcaggaaccccaaatcaacaccccaccccgggggnngcccctggaccccttggggacaaatacc

SEQ ID NO: 3594 - DNA, 448 bp, Homo sapiens
  misc_feature (1)...(448): n = A,T,C or G
actgaggtgcctgcaggaggccaggaggagctgggagatncntggagctgcntgactgatattggcacggngagctnaantnaggccncacnnttcatgcgaacatttttgagataatacctgcagacttaacactctaacagagtacagagtgaactcttagacaagcttcttccagngatgacattttccaaaactgtggcatgatgtcatgaccaggacactgaccggatgcagccaccagctcttaccagattcacctgagtccctgaagtcatttgtgagtgtccacggagtctgagcatttctatcacctgtgaagggtctgtgagtccaacactgtagtcaaggtgacaaagatctctgtgttgcccactgngggggctacatgacactgccattagcactccccgagacaaggcctttcctganggcctgaacctggggg

SEQ ID NO: 3595 - DNA, 105 bp, Homo sapiens
  misc_feature (1)...(105): n = A,T,C or G
ctggctggcatcatgtaccactaattccttatgataagacagacagacnttgctctgatagatgaaccagctctccattanggcctaccctaggacctgattcat

SEQ ID NO: 3596 - DNA, 169 bp, Homo sapiens
agactgagttttctggatcaatggcttgttcagcatccagaatgtggctgttgacatatctacacttcgcaccggagtgactggaattgtggctgtcctgattataggattttaactgaaataactgtttttgaataaatgtgttgggttcccctcacacacaccccca

SEQ ID NO: 3597 - DNA, 261 bp, Homo sapiens
  misc_feature (1)...(261): n = A,T,C or G
actgagggttagatgccttgtgggagagtcctctttgggctccgggctgagttcagcaggctctcctctatggctccattcagtttcctccctcacattttctccagaagcctgaagagtttctcctgcctgctgtggnggatcttcttgaagganggccttcatctgcttttgtgtgttcttgggngttccttcgttcttgtcacaagacttttgcatgctcattgttttttttcttaacnaataaatcctgtaaatatc

SEQ ID NO: 3598 - DNA, 265 bp, Homo sapiens
  misc_feature (1)...(265): n = A,T,C or G
gactgaggacagttctttctgactaaagntctctagaagtctgnctagctngncctcactgggaatggngaacataggcccatgcgcccacccncctgtgctcacatgtcctgaagaaatcttccacctgnacctgaagctcttttattcaggtccngcaacagtggtcatatcagcctttctgacgctgngagtctttaatacatttccttgngttatggggacaccctccccaataaaataatttcattgctaaaaaaaaaaa

SEQ ID NO: 3599 - DNA, 187 bp, Homo sapiens
  misc_feature (1)...(187): n = A,T,C or G
caggctcttaaaagggggcnttaccagcnantttcaaaggtctgaaggcatcagaataaaagaagaactntttanntgctgagnccnannanaacctcaggccaccgggaactctcaaggctnttgcttcgcaagagcaattaattaaatgcgtctgcgaactaaaatganaacacttaaaaaaagg

SEQ ID NO: 3600 - DNA, 137 bp, Homo sapiens
  misc_feature (1)...(137): n = A,T,C or G
gggatgggaacaatatccgtgtaanaaggttgctgcnaagatgaacccggcctgtgtgtgaagtacgtttttgttttttgtttttgttttttcagctgnaaatcgctcccccagatgttagattattatcaccatta

SEQ ID NO: 3601 - DNA, 194 bp, Homo sapiens
  misc_feature (1)...(194): n = A,T,C or G
aactgagcacaggatacaccatcgggcaatggcaattgccatcatggtatcctgttataaaacaggaaggtgaccntgttccccagnacncattcaatagaanaaaccaganaagncctgnncntgcggcttnntacttgtaccacaggatangtgtngcgtcanatcggntgccctcccccttacttaggcca

SEQ ID NO: 3602 - DNA, 373 bp, Homo sapiens
  misc_feature (1)...(373): n = A,T,C or G
gactgaggcagttgcgatatttaattcagcatttggaagttttttgggcattgntgcgactacggtgctccngctgnttttcctcnggncatcctcttcggtgccttntacattcattttctctcagctgtntatganagcngcaggttnctcttgtcattggacagatctnccagcgntatatcgaaggantggcntgggagagnnacaagccgctatnttgncgtggtcagnagaagngggcnactaanagacatctacacnantttntgggtcncgnttttcaaaccnaacatcgactngaccaggtcagctcancttnttctgttatatnggctccntcaagtgggcgtctgctcagagttctcctttt

SEQ ID NO: 3603 - DNA, 137 bp, Homo sapiens
  misc_feature (1)...(137): n = A,T,C or G
acgatgctggagacctacttggaaccgtcaccggtntataggcatacacattgcggaaacnccatcatattgaaggacattgtcaaagttctgagaagaaatgaaagctcctgccttcctgacccgcttgagctcga

SEQ ID NO: 3604 - DNA, 155 bp, Homo sapiens
  misc_feature (1)...(155): n = A,T,C or G
tcacaggtccggacagnaancatgggtggtcnccatcacctgnaaagnaaatccagagccctnttntggtgngtctgaanacagctacngnatattcatatatataaaanaggttaanttttaaaccacataaaacatattttcatgcctggcaa

SEQ ID NO: 3605 - DNA, 253 bp, Homo sapiens
  misc_feature (1)...(253): n = A,T,C or G
tgaggccgcccgtcctcactgcacgagtacctctcaggctcaagtggacagctgagaggaagcaagtgctctgcctctgaggagagcnctcatcccatctggaaggatgcactctcccagaaggttnacctccatgtacagtgcttctcaacccagcacatcagtctgtgacatntgtgatgtcatggnnaanaatgagnggcctcccctgatgctttgaaataaacnccnantcataggcaaacctccaaaa

SEQ ID NO: 3606 - DNA, 132 bp, Homo sapiens
gatgtacgtgtgggattttcagagagagagttgtctgctttggtgaaaattcctgctggagaagactacagtttgaagctgaggctgctccaccctataataccagaacagagtacattcaaagtactttcg

SEQ ID NO: 3607 - DNA, 470 bp, Homo sapiens
  misc_feature (1)...(470): n = A,T,C or G
gactgagacgcacctgtctgattactcagcaaagtaccaggcacaaaggaattcgcactcaccaggaggaacaatgggcacagactaccgagncacgaagggaagcgcctcnnnagnccttgncaaagtttttatccacnnaagnaatngcacntgcaggttctnctntttctntanaagatggcataggcccanggtcctaganacanagagcatctcacatcagctngtaatanctgcannnttacttgtgnttctgncctttaaatatgactgccgncacctntgtgtccttatgggtaacaaatgtcccttcttgcaattttttaaaaattagtattaatntgatgaancgnncgggaggcaggtcttgcctgttaacttgtatcctgcccagnacagngccacggccactttccntgacagtnnatgnaatacncangcaatccatggaagggtaaacaggacag

SEQ ID NO: 3608 - DNA, 154 bp, Homo sapiens
  misc_feature (1)...(154): n = A,T,C or G
ccattaggtagagcctgnnaanaggggaaatgctttatttannacacagcctgacttcaaactctgatcctcccgccnccagtttccangcactggtcccactgnatntgatgccatgtgatggaaganaatgaggantttcaatgaactaaca

SEQ ID NO: 3609 - DNA, 519 bp, Homo sapiens
  misc_feature (1)...(519): n = A,T,C or G
ggtgattttgaagttctaaatctcctgctaccaagtgctgggattgcaggcatgcancaccnnatccagtttattcagcggtaaggattgaaaacaaggcttcacacatgctagagcaaggacggcgatcacgacaacgacacgacaacaatgacacacacgcgcgctcgagacccccatctctatgacagtctttcatatcttnnttcaggnngatgtttatcttggtttgtttccccgaaggaaagctgagacccagaagcaaggcccttcattgagagcacccgagaaagaagtcaatggcggcaccagagtgagaaccaggtctttgaactccttatacagggtgtgcctttcctcaggcagcgtctaggagaccaaaggctgccctgggtttcccaggcagctccttcaccaacctgccattgctctgagcacccaggctcangaggttgaaatgaggtctggtattggnggncctcagtgattttaaggnactctngggacaattctgctgca

SEQ ID NO: 3610 - DNA, 329 bp, Homo sapiens
  misc_feature (1)...(329): n = A,T,C or G
tttattcccatactttaanaaatctccatgggcgcctacactgtcctagntgntgtgtgttgtaatgnnttactgacatgtttcctggacaagaccagcctagtanagacaacactaaatgcntacncgaaacagnaggactttgagttcaaggccagcatggactacatanaccaggtcnatctcaaaanaacanctacagcaacaacancatnnaaagaacanccgcccattaaaaactacaaacagagctgcacaaanacaggtgtatatgaanttatgtaaaanaataaatgggttcctccgacaccaccgcaaaaaaaaaattt

SEQ ID NO: 3611 - DNA, 152 bp, Homo sapiens
  misc_feature (1)...(152): n = A,T,C or G
gcaccacggttgcatacttggtnaggcagtttaatttggtgggacataagnagccctcncccncattgacttaatacnttggtgggangccccangctgtntnannttggnnaatctatctaanaaatcctgttaatatgtaaaaaaaaaaa

SEQ ID NO: 3612 - DNA, 116 bp, Homo sapiens
  misc_feature (1)...(116): n = A,T,C or G
taggctaactctgccggcnctcctgggcgaagaanacagttcttgnttgtgagtancccatgcaaactgtgtnaatnagcacnnggcatcccggacccctccttgttttctccaga

SEQ ID NO: 3613 - DNA, 220 bp, Homo sapiens
  misc_feature (1)...(220): n = A,T,C or G
tccaggtccaattgaaacgagggactgtganaatctccaaagactgcagccgtggcacagttcctgccccntggggagcatttgnttcgtgccaggcaccanctcangcctncngcgagtccctgcctnaggnagcggntgctctngcatgggtgnccacgtntgaacttgtggaaacattgtgaagagtcttgtattgttcccggctagaaaaaaaaaa

SEQ ID NO: 3614 - DNA, 132 bp, Homo sapiens
  misc_feature (1)...(132): n = A,T,C or G
tcccttgcacatctttgactgagttctacgtggtggtaattgtgaagaaaactgangcactgcatttctggtaatattcctaggccttttgcttgaagacataancncataaagccaccgatgttcatcaaa

SEQ ID NO: 3615 - DNA, 461 bp, Homo sapiens
  misc_feature (1)...(461): n = A,T,C or G
actgaggtggggtctttcaggggcagntgaggcgccgggcctcctcccctgtggctgcctccaggttccggaccgcgggaatccttcgtccctcctagtcctgctctggctctgggacacccagagtggtctctgtttctccttacctggaacaccctgtttcctgaggaggagctgtcngcccccgaataagcctcccgcgccctgcctgggaagtctctttctcaccccgagaccgcctttcgctcgatttcaaccccaagtttgccacggagtccctcattcaaaccatctccctgctgtcaagagatcttcggggcgtcctcccagattgctttcgccggcctccgatgtcctgacttcttccaatgncacctacagcccccttggtnacagngcagcccaaaantttaatgcanaggaaaagnctggattggnttcacaggccttttaaaaagcgg

SEQ ID NO: 3616 - DNA, 323 bp, Homo sapiens
  misc_feature (1)...(323): n = A,T,C or G
actgaggtaagtctccacttctggaactttctgattgctttccttcctctgggtcaaangttcctttcctgattttnagccaactgtgaactccaacaanaagctctgacactggcctcctggngggagaagacactgagggccgcctctaggaaggcaaagaggcaatgcctgtgaaacccagagngctcctgccctttggcctagtaagttcacctgtgggaggttacatcagagananacttgcntgggtggncaaaggatatgcaagaaaattcntggnggccagaattaaacaaatcngaaaccatcctgaaaaggga

SEQ ID NO: 3617 - DNA, 144 bp, Homo sapiens
  misc_feature (1)...(144): n = A,T,C or G
ccagattaaaggacgagcnnatgattagaancatctagatccttngttggcaanagngcagngtnaagnggnttagnntccaggaagtnccctggccaaccatggacaacatagactcgggtctccaaaacaagataaaaaaaa

SEQ ID NO: 3618 - DNA, 226 bp, Homo sapiens
  misc_feature (1)...(226): n = A,T,C or G
catttgggtgttgtgtgtgangncancattgacccgtccatctgagggtggngagggctaggacagcccccntgggtgttacctantaaatgtccttcctgctccctcatttgactctgantgagggcncnntngcnaaannntgnactgaattgtgctaantttgaccctncatctaanccgggnagagcaggacagcccccatggnttttccccccccccaaaa

SEQ ID NO: 3619 - DNA, 136 bp, Homo sapiens
  misc_feature (1)...(136): n = A,T,C or G
ccctcttttccccccccccccgaacccccccccttggggnnttttgggaaaaaaatccccctttcccgngntnggggttttnaatttcccantgngaaaaaaaacnccccccnccccccccacccctttggttttt

SEQ ID NO: 3620 - DNA, 141 bp, Homo sapiens
  misc_feature (1)...(141): n = A,T,C or G
aactgaggtgcctgggtgngtgangtcctccccngggcgcngcctgcnnaggcagggagtncngnggatccagcttcanccctcngcttgncccatcttagctgacgtaacaagacctggcttccttttgaaaaaaaaaaa

SEQ ID NO: 3621 - DNA, 303 bp, Homo sapiens
  misc_feature (1)...(303): n = A,T,C or G
gactgaggacactgggagcctgagcccatgctaacaggtccaggggnaaggcacagcaagattctgtgaactgatgggcccaggtcttccctgtgagactcgactgttccctgccaagaaaaaccctgtgaccttanaaatggaatccggtaggagcaagcattgncttcagcctcatttggcgcttattanattgatgttcttggaggaatcgnacaacgtgaaacatgtcctcaaagaggatgaactttagataaggttgcagctatgtctataaacatttataacagtcaaaaaaaaaaa

SEQ ID NO: 3622 - DNA, 482 bp, Homo sapiens
  misc_feature (1)...(482): n = A,T,C or G
gaactgaggaggagctcttggatataaaagacgtccatactccaagcagaggccatcatgcctctctgaaaaatatgacagtgatggtgtctgggaccctgagaagtggcatgcctctctctacccagcctcggggcggagctcaccagtggaaagtctgaagaaagagtcagaatccgatcgaccttctctggtgcgcagaatagcagatncncganngcgnntgaattaannngactgagatgtgganatnngnccactgagacgatggctttnnnggtngcngcnatgggacanctgntgttagntnccgncgatctgncacttcatttgncnaaagacatttgatcnnactgagcctgctngnaggacnaananntgnntgcnntaggataatttctgcccggcctttgaaaaggatcacccgnctcanngataaggacctgnnagacttgagagaccganacagagagagggactac

SEQ ID NO: 3623 - DNA, 108 bp, Homo sapiens
  misc_feature (1)...(108): n = A,T,C or G
tgagggacggaacccnagagggacttntgcgtgccatcangggctcaacgantgagccncnttccnggcccnttcaganccttattactcttggacatgtggcacaaa

SEQ ID NO: 3624 - DNA, 194 bp, Homo sapiens
  misc_feature (1)...(194): n = A,T,C or G
gttctcacctgcggttancntgtttctggtattgtgacaggntattnatgcaaggatgggaacactnttttattcttganngctgtngnaaaattntcaaggaggacacagagaggatttntaaatgagacacntggtacaagataacatgntccaaatacctatagncctagaacancttttttttttttttt

SEQ ID NO: 3625 - DNA, 179 bp, Homo sapiens
  misc_feature (1)...(179): n = A,T,C or G
tggacctttatctatagntgaagcaagacacacggggtgccntcanntacaagtanactncacccnagcntgactcctcggaactgaatgtntgtatgttcccttgnaaaaaaaggnttgcgttgggggctccaacaganagangcttaangttttatatatgaggagaaagaaatgga

SEQ ID NO: 3626 - DNA, 230 bp, Homo sapiens
  misc_feature (1)...(230): n = A,T,C or G
ggtgggacaggaagcttggctggttccaanacgcacangcatgtaaaangacncctntgccctggncctngtttagttnggaattattagcacatggtttatttccccattgcttagatttagcattgantattttatgagtgtgctatgttaaccaagtatttctattttcattactccaaagaacattgaatattacagacagcanaaaagagaaataacaccaaaga

SEQ ID NO: 3627 - DNA, 266 bp, Homo sapiens
  misc_feature (1)...(266): n = A,T,C or G
actgaggcaggaagtccccatccagtattccctggccatgctgaggcccagctgacctggtgcttgaacagtgatacatagtcctgggctccctcttcactgtgtgggtcaggcatcaaacagtaatcccgaagacaagttacccacttggctgctgngtgcatggagctttgttgacgaacacggatgctcaagaaagctgtgtagtaattcttaaacatgatctcctgcaactagaatacaaacgacacagtgaaaaaaaaaaa

SEQ ID NO: 3628 - DNA, 120 bp, Homo sapiens
  misc_feature (1)...(120): n = A,T,C or G
cctcactgtactggagctgnactgacatcactannggcnaaaantatgataccggcacagatnatgtaactttgattattctatcagagtttattatctgngangaagtgatgtacattt

SEQ ID NO: 3629 - DNA, 256 bp, Homo sapiens
  misc_feature (1)...(256): n = A,T,C or G
ggaccacatgaagaggccggaggaggatgcccatcacangccaagaagagaatgccgangaaactaagctcctgtacacttggatctcttaatttagcctatggngctacattgtggcagccttggtcagangtaaacagggacaggcataagacaattaccaaggatctcaattttaaaccttaagtctttattgccgatcaattctttgttgtttanggcatggattttaaccttaaaaatatttcttagaacc

SEQ ID NO: 3630 - DNA, 203 bp, Homo sapiens
  misc_feature (1)...(203): n = A,T,C or G
tgccttaggggacaccaggagcctctgtanctgggannacagatggttgttgaanncancttctntggangaggataagcgtgttttancggcatnanccatctattcnacatctgcttttttgggnctttagncacatgntgaaggacccancgnatgattgggaccgccagtcacntcngaggagaccctcccatggatca

SEQ ID NO: 3631 - DNA, 105 bp, Homo sapiens
  misc_feature (1)...(105): n = A,T,C or G
ttggggaaaccagccactcctgttgaccttggngcaactgagcncgagaggatttgncatgacngaaggaggcccacacttgccagctctgctcaacggaggttc

SEQ ID NO: 3632 - DNA, 121 bp, Homo sapiens
  misc_feature (1)...(121): n = A,T,C or G
gaaaacctgaactgaaatgcacatacccttctacaganacaaanatantttagggtaaatctaanaagaaaggaagatgattcggtaaatttatacttaatacagattagttaaaccaaag

SEQ ID NO: 3633 - DNA, 172 bp, Homo sapiens
  misc_feature (1)...(172): n = A,T,C or G
atgaaattccaagtaaagaaagagacctgttttttgaattagangnaaaaaatattttggangttgatttatcagtgctgcaaagtactaattgctattgagagtaatgtnacatttgnangttataaagcaaaatagattaaatatgcnctcttttacatataaaaaaaaa

SEQ ID NO: 3634 - DNA, 226 bp, Homo sapiens
  misc_feature (1)...(226): n = A,T,C or G
atcctacagttccaggagncagcngtgtanntactgangacatatcatnaaccagcanggcttctccaggaccaaccagggtcagangtggctatcagaaaggctcagccntagctctgggccacataaggtcaggacaggaatgtggagcatgtgcaagcagccccacagactctcgaagatgggccagataagctccagctgtttattacaaaataatgactcc

SEQ ID NO: 3635 - DNA, 202 bp, Homo sapiens
  misc_feature (1)...(202): n = A,T,C or G
ggtacacactgctcccgtaantnagccttgnngcagggcatgaagangaaanggacctntgtctgcagctcaccggcagcccagcctagctccaagttcagtgggatgcagacggaaaaaaacacaccaagtagttagcaccccacactgtgcggtttcaaagttaaagnggtaaactttgttttctatgtaaaaaaaaaaa

SEQ ID NO: 3636 - DNA, 146 bp, Homo sapiens
  misc_feature (1)...(146): n = A,T,C or G
taaggtccacattcattacccatctacctgctggngaatatttaggtcatctctactgcgacctaaatattgatngagaatgtgctacagncatgtgtgttccagtgtctgtataaatgtctgcttttaaatcttaaaaaaaaaaa

SEQ ID NO: 3637 - DNA, 210 bp, Homo sapiens
  misc_feature (1)...(210): n = A,T,C or G
ccgctagttcctcctgtcttctgtttttcataccccacgcacacaancatgctccatccacagtgggganaaatnatgggggaagacggtngacattgcattgggaanangtgctantgaaccatagagtttggatgtcaagccntatattgtgttattacantataaaanagttctancacagngatctttaacttttttttttttttt

SEQ ID NO: 3638 - DNA, 121 bp, Homo sapiens
  misc_feature (1)...(121): n = A,T,C or G
gttactggtttttgagcatnttggccataanntanttcatagtanatgagctgactnagnagncctagagcntttcnactnttgggtcacgtgagacatncatcagtctttatatagccct

SEQ ID NO: 3639 - DNA, 169 bp, Homo sapiens
  misc_feature (1)...(169): n = A,T,C or G
ctgggagacgccaatgagtgangnaagccgngntcttttagaagntctgtgattncanaccnncaagnggnnanatgagcccatgaatgtgaanggtcccatctcaggggcttggggcatcacaggctgaataaagaggaggaaagcangctgaacaccaaaaaaaaaa

SEQ ID NO: 3640 - DNA, 341 bp, Homo sapiens
  misc_feature (1)...(341): n = A,T,C or G
gactgagctccccattcgtggattgaaagaacanctgagcatctatacctcaaggaagcatgtgattggacatggaaaatggaggtggagctaagagtttcagagacagagagagaagacagaataagaggaaaaaaagatggagaaagagaaccagattccgcacggcttttgaatagccaaaggtagctatgaatatcttataagggatggataattacaggaaaatttgtcttatctatgtgcacaatttatatctatattaattggctctgagttcattgtgtggcattttgtggggtgagaatttactgatataaatctgacttataaaaaaaaaa

SEQ ID NO: 3641 - DNA, 218 bp, Homo sapiens
  misc_feature (1)...(218): n = A,T,C or G
cttattcagctgtcctnnggctggaangaaacttctccagcttctgctgccagctttcatctgccacctgacgcgaagcacacgactcccgtactcctnttctgcaccctgactcctgctgctacctctgaccacggtattctgcagagcagaccccccagcttcttcaaactcatcccaccatcacctctttctcatataaacccctgaaccccaaa

SEQ ID NO: 3642 - DNA, 116 bp, Homo sapiens
  misc_feature (1)...(116): n = A,T,C or G
tggcagcatgtatatctttcgtangtatttancaaaantatttngtctccccataaaagttganagantttcgttgggacaccagaanataaataattaccattgaaaaaaaaaaa

SEQ ID NO: 3643 - DNA, 180 bp, Homo sapiens
  misc_feature (1)...(180): n = A,T,C or G
gtctggcccagccttggtctctcattggnacacttgntccattcgnccaattgnacagaaaggggctgtngcctgaanaaaatctanactttccagggtcaggcataggactcagtgttatgcatggtggccatgagagggcattctgaacatgtaaacaccatgtcatcaaaaaaaaaa

SEQ ID NO: 3644 - DNA, 125 bp, Homo sapiens
  misc_feature (1)...(125): n = A,T,C or G
tgcataccccaccattccattcctgggatggagatacatgctctttgtactgctttcttgtcccttccaggggctgnccacttccctacccatccaactgtgttctctttttcttctctctctca

SEQ ID NO: 3645 - DNA, 190 bp, Homo sapiens
  misc_feature (1)...(190): n = A,T,C or G
gagagggccaactttgcccggcggangatntacttggtctttgantaganaacntttatgaaactatnnaggngatcctggggactgcacagcctgtgggnctgtaatgaggatggccgncnccctcatgacatnatagatgncatcancagcggtgcanntggagtgcccagctaggtaagaagcatca

SEQ ID NO: 3646 - DNA, 155 bp, Homo sapiens
  misc_feature (1)...(155): n = A,T,C or G
agaaattactgggccaggtgcgggggtgtacncntttaatccnancacncgggaggnagagacngnccgattancgagttcnaggncagccngttctacaaagcgagtcaccaggacagccagatggtttntttnagaaaccggtgtcctcaaag

SEQ ID NO: 3647 - DNA, 150 bp, Homo sapiens
  misc_feature (1)...(150): n = A,T,C or G
ctcttttgcactgagctgcacctgaaagaaacggcaggatcataangggaccagcaccttcagngncccaagagatgaatcngaagccncgnancttggggtggactttcctancctgtnnacaaagtaatccctcccttgctgggtgaa

SEQ ID NO: 3648 - DNA, 216 bp, Homo sapiens
  misc_feature (1)...(216): n = A,T,C or G
cctttgccaaactaccactactcncccaangaagctcgatcattcggcccntttggcccaanagcncccatcgctattgttntattttcgcttggggnggaanttcgtaganngcaagaggacncttcccttgncgaangaataaagcntcgaccttngccattcntttaaggcccttggcttgnaacccccccatnccttggttttccaagaaac

SEQ ID NO: 3649 - DNA, 193 bp, Homo sapiens
  misc_feature (1)...(193): n = A,T,C or G
gacatggaaactgaggctcatgagganatgtnctatgcccaggtccctcaggtcttccaacaagaaggcagaggaagagaagatcacacgcagcaagaggtagaatgttctctgaagagagaaggatgttcaatgtcagccagggctacagcatgaggtcctgatgcaaaataaaccaaaccaagatgagaga

SEQ ID NO: 3650 - DNA, 143 bp, Homo sapiens
  misc_feature (1)...(143): n = A,T,C or G
gagactgaggaagccttagcgcatgtnagcagncactaaatgcttggaatntggacattggacttatgaatgcnnaggganaagaaagtncctactcagaccttcgagaacggcagagctgaagaaagctttaaaaaaaaaaa

SEQ ID NO: 3651 - DNA, 421 bp, Homo sapiens
  misc_feature (1)...(421): n = A,T,C or G
gactgagatgtccatggcacaagaaagcggtatgaagcctttacctgcgaaagaatgatcctatatgtagagaaaagttcagaaatggagacttccattgactacagagacccatgctgcaggagaggggctagggcagggtgggcttgactggcaccggttggcaaggattgccatgtagtgagagctccggtgatgagcntgcagatgtcttggctcagagctggtgagtgctctctggcaggggcagggcctccagagaagctcctaggtacttggaggtggaaatcatgtctcccgaggactccacttccccacgagaacagaatgacacgtctggagttgggctgtgatgtgtgggcaccagagggaggcactgggttcttactcatgaagttttaaaagcttactgaagccaaaa

SEQ ID NO: 3652 - DNA, 208 bp, Homo sapiens
  misc_feature (1)...(208): n = A,T,C or G
aacatcttattcctatatataganccggtcangggtctatnacaggcacagaanactaagtgcaacgcacctgggtagacgccaaggagtgaatttgntggaggctcttttggagcctgtataatntaaanatncaactanncnaantgaacacatttatgccantgcgtgnctatcntcaaaaagcntggggcatcacaggcttgaa

SEQ ID NO: 3653 - DNA, 123 bp, Homo sapiens
  misc_feature (1)...(123): n = A,T,C or G
atatggggtatacaacctagagancagctgcnantggaaaacncgcngttcccctntgncgtanacntnaggtagngcatggctcgtgtgacanttttgtgccagcgctctccgtcctctatg

SEQ ID NO: 3654 - DNA, 303 bp, Homo sapiens
  misc_feature (1)...(303): n = A,T,C or G
agagcccaggaggaatggtgtnttctatgccatgtagggaatgagaanacatcgtggttgttccttncgaggctccncatggagctggggtgcctgaaggtaaatggtcccaaagccaggggtanctgcacccctgtactcagggataaactcctgaccccaggtcctggtcaagttgggagtctttaaaagacagtgacaggcagaagtgactctaagagcacctgagagtttctactcccagacctaccagggctgaacataaaggttcaagattgttccaaaccaagaaaaagcaaaaaa

SEQ ID NO: 3655 - DNA, 458 bp, Homo sapiens
  misc_feature (1)...(458): n = A,T,C or G
gactgagggccggcatttgcttactgngncctgaagactgaagcactatattctganccagaanctctttattgacacctttcggggaacagccgangggcccctgtctggcataggtngcacacaaatggtgtcctgttgactaccctgaagacctagtgagctgccagagaacttgacttatggacctgactggtgtccagtcctaggactgcccttcgtgtgtctgctatgctatcttgtctctcattttaacctcatcctctttgatgatggncccttcccacctcccattttccctgccaataagaccaggaaaacccagagcatgcagacacacagcntatcagtgaatctgaagaccaggttgacattttagctctgaccctctttccagtatagtttcactactcagaaacaaaatatatgaatgtaaaattgctatttaaaaaaaaaaa

SEQ ID NO: 3656 - DNA, 240 bp, Homo sapiens
  misc_feature (1)...(240): n = A,T,C or G
ggtggacacggccttggtcacattacacactgncngnangtncacccccaggtgtcagctgntgncagtgnccacctgtgacctnanctcaggacntttaagtgacttgncagcctgtgccgcagaaattnttctgccnngccnggggcttagagggtntcaattttncncacttggtaaagggatgtnagaaccntttgagaagcgctnacaataaagcgttntggcataaaaaaaaaa

SEQ ID NO: 3657 - DNA, 377 bp, Homo sapiens
  misc_feature (1)...(377): n = A,T,C or G
gctgctgggctgaggctgagccnaccacacacacnantctnggngntcatgggtgtgancagatctcctgcnngaacagggtctcacggnaaccaaaccagcatcgacatcacttgtgtggagaaaaancaccttgaatttcgaattctcctacctctatctcctgagtgctgggattataaatctgcaccattgtgtccagtttatgcagaagctgtagactggaacctagggcatcctaaaggctgtacaagtttttaacacttggcctcacatgtagcccccactggcctggagctaactacatagacaagagcagactcaaccctttatcaatcctgcctctgtctctgataaatcttttttaaaaaaaaaaa

SEQ ID NO: 3658 - DNA, 112 bp, Homo sapiens
  misc_feature (1)...(112): n = A,T,C or G
aaccttgagcaagctaacgacagntgngcacctttctacttggancaganantattngnaaggtaaancaggtgtccccatcgcccacttccttggataacctggagggcgc

SEQ ID NO: 3659 - DNA, 199 bp, Homo sapiens
  misc_feature (1)...(199): n = A,T,C or G
agtggaagcactgaaccnnactggnaagagtgagttccgaagaaaaaggattaggctacntgcttgctaatggangtctagagctaaanttctgaanaatgaaaaaggatcagcctatgcctgaatagttcgttgaaaagctaatgcctgcntggatgaatgaatggcntanctaaatcacatctccaaagaaaaaaaa

SEQ ID NO: 3660 - DNA, 348 bp, Homo sapiens
  misc_feature (1)...(348): n = A,T,C or G
tgagcttccgcatgttatcaagagtcctatcttcnngtgagncatggattggcctttngtntaagtnnngggcaganttgaggctcacttctgcnacatnngcctcccttcctcccccttcancgtggnattcttcccatnggtcccanagtancccanggannnatcactntaagctancctgtgctgngctcccttgctgcatactgangaaggaaanatatatgntacagatgcccctaacaaaatctaattacatgctctgatggtggtagtctagtaggcatctttgctttaaaactgtgggattaagtaaaaagtagaatgttaaagatttaaaaaaaaaaa

SEQ ID NO: 3661 - DNA, 171 bp, Homo sapiens
  misc_feature (1)...(171): n = A,T,C or G
gactgaggccccggtgagantaatcagttggcagccnagcctgaggtgcagcctgtattcncatggaaggaagactgnngaanatggcagacagcttcacncccccttggaaagaggnatactaaagangtgtgtggctgcacagctagagaaataacgccaacagtctca

SEQ ID NO: 3662 - DNA, 189 bp, Homo sapiens
  misc_feature (1)...(189): n = A,T,C or G
gactaaagatgaagangcacagcgacctggacctggaangncagaccagcgtntgcctgagggatgccttcctagcaggacnggaggacnnancacacagagagcctnctctatagatttcatcctggnctccaagcatgtggcagattgnctaggnntcccctggggctngaagagaggcaccaactg

SEQ ID NO: 3663 - DNA, 111 bp, Homo sapiens
  misc_feature (1)...(111): n = A,T,C or G
ctgagactgaggttataatttccggtgntttaacatgtgatgacgaaaatatccattcaaatccagcggcatatgaaagtagaaacataataaagggttttctggttttaa

SEQ ID NO: 3664 - DNA, 178 bp, Homo sapiens
ggagtttcttttctaacaacccaatggtactcgagaatcagccaagaccagatctaactttgaatttgaagattgacagctgaagacaacgctgaggccaagtctgtagttcagtggtaaagtgtttgcctagcaagtgtgagtctgttaagtggatgcccaatgacataaaaaaaaa

SEQ ID NO: 3665 - DNA, 132 bp, Homo sapiens
  misc_feature (1)...(132): n = A,T,C or G
actctatggtgaggactgatggacatacattatntgagangagaacactaccaggtggncagacacgtanngtnanggngcttcatagaaggaagatctgaccgaggggncgnacagcgacaacctgtgatg

SEQ ID NO: 3666 - DNA, 201 bp, Homo sapiens
  misc_feature (1)...(201): n = A,T,C or G
caccagaccagctgaggattccagnttgnacnngtgncagagactcaaatggcctaaactcctggctgagtggttngantgntgctgatggntgntgaggaaaggagacncctcctncattnggggnaccactgccactgataaattgcncatgttccaggangtggcccacacccatatgcctatgattagtgctaatta

SEQ ID NO: 3667 - DNA, 462 bp, Homo sapiens
  misc_feature (1)...(462): n = A,T,C or G
cttctcaagttctgaactatgctcctaactccaaaatgtncncttgganaaaggccaaggtctcaatangcccnntgtgcaggagaggtgaccacagatatgctgaggngaaatgtganacaccatnaggagtgggacacanaggntggaagaactnagatctgtagaganctttcttggnaaggggatggaagggcctcancngaanacanacttncancaggacanaannctntcctctgcnnnnctgntttaagcaacagctttnctgtatagctatcnaagttgntgaacaagacacaaagaacatgatacttacagaagggtgtacttgactttggaggacctccctcccctctgcctcccaccaacctctggactttcttctcagtcctcttttctttcctttggtcaagtttgtgttttcagtaaccatctaaaataaactctgacttttcctac

SEQ ID NO: 3668 - DNA, 271 bp, Homo sapiens
acctgagacgctccaagctgacagagggacgactcctttgatctttccacccacccatctgcagcccagtagaggtcctcgttgttcaggggagcccctttctgtagaaaccaggcacttgaatcttatttgctgctgtgggatcaaaatctcagagttgagcccattcaccctatgccttcccttcctagctctggggacatcctccactagccctccactagccctcagtgcctttgggctggccttccctctaccactctacctggag

SEQ ID NO: 3669 - DNA, 146 bp, Homo sapiens
  misc_feature (1)...(146): n = A,T,C or G
tatactccatacccanaggacttgtgaaaacagatgtctanaaccaacgtggttccagcgtcgctttgatcccnatactcgganggcagaggaaggaagatctctgtgagttccaagttagccttatctgaactcaaaaaaaaaaa

SEQ ID NO: 3670 - DNA, 253 bp, Homo sapiens
  misc_feature (1)...(253): n = A,T,C or G
ttgcccatattctactgaatgnctctacacaccatctggatgtatatgngcanccagaaatggnnctntgtgggttataaaagaccantgntnaggaagaggangacnnngnnaggccngactntcctttanagatcagaaggctgagctgcntgacaanctgctntcangactaagagactgttagctttcantctgccnaggcctgttgttgcctgtgggtattgtctagaagctctcattacatgcttag

SEQ ID NO: 3671 - DNA, 497 bp, Homo sapiens
  misc_feature (1)...(497): n = A,T,C or G
cagtaggtgagagatgntaanctccaacctgntgacttgcnggagcacaaatgactnaaaagccngtgnctnactaaaanactcatctnaacatangtgacagnccaagaactacagccctggaactttntgcacagctngcaggattactgggagtccngcgnntgctnngctncagggntnaggccgatcagggaggtgggacacgnaangnttgactgcacngaccccanccactgccgnttgccggncaggngncgtaagcttcggnncnccgctccagggcctggagctcatnnactggcctagactggctggccagttnnccccgagggatcctctggtttcngcctcctcagtgcgggaattgcanctctgggtcacccttcctggtattttgagngagttctggagctcnnntcanctcaggngcttacgcttgcnagcncctgctttcntgactgaacgatatatccgcctgggccgctttgcttctg

SEQ ID NO: 3672 - DNA, 268 bp, Homo sapiens
  misc_feature (1)...(268): n = A,T,C or G
aactgaggctggccagaaagctccatctctctccggncggatcctcctcctgggaaccggaagncccacctttacccttcgcccancaattggnttntgccttntttattgaccaaancaagaaccanttagggaaccagatttatgttatcagctcctcctccgaagctgcctcntgaaacattgccagaggttgtagctgagtttgatcaanctatcttggtctgtgctttcaataaaccagctctatttaactgaaaaaaaaaaa

SEQ ID NO: 3673 - DNA, 493 bp, Homo sapiens
  misc_feature (1)...(493): n = A,T,C or G
aacccaacaggaaaagncgccgccacctcggcctaacctgctgnaagcaggngttgaaggctgnnaggagctcaagcagcangtgtcatgggagcagganttcctggtggggaacannccangaggcanngnactgggctcttgtgcatggtgtgtggggcctgagatccngttccncatnagcnnacactgctcgagcacacatcctggagcagnatcctcacaccctggacctgagccnctgtganaanaccatcatcttagaagcctggagngaaggggttgcccttctgnaagacatccaanntgaccagccatccctgcccagcctagagtcaggccaggatggccagccagaccccatctccaacccggatcctgtcaggatgccagcagagatagnggtcctcttggattccgaggacaacccatccnttcctangaggctccggcccagaggactccncccccttgagctgcccgttacccctgt

SEQ ID NO: 3674 - DNA, 161 bp, Homo sapiens
  misc_feature (1)...(161): n = A,T,C or G
ggtctatgtctggggcccnnanctgtgggggtctgntctaggcntngcactctttactctccttcagaacctgntagaaaaacgattttacaaccanctgatgacaganggggaaaatgtnttgncagaaaccacaaggagctctttctgccatctctccg

SEQ ID NO: 3675 - DNA, 285 bp, Homo sapiens
  misc_feature (1)...(285): n = A,T,C or G
gactgagggctcacgtctgngtccaagaaaagagcantacagcatcccttgaagccaacgacttgataccttcatgcttcttgaggacagcagggtctaaagaatgagntcctcttgggcagccttacctcgctcccatgtctgctcctatccccttacatagagggctgaatngccattttggaagattggccttgccttctgttcaacataatatttaagcattgactttatgtaagaagatgaaatttaaagagttgcaacttctgcattaaaagaaaaaaa

SEQ ID NO: 3676 - DNA, 202 bp, Homo sapiens
  misc_feature (1)...(202): n = A,T,C or G
ctgggacgagtttttgaggtcaatggaggcacnactgaanctggtggaaggcgtttgngagctccatcagaggtgtntgtcccctggnntgnacttnnnactgaccactgcactgngtgngacgtcannccttcagnttaccctgnagccccgncagggtncaggaccaggggcgtgnggactataaaagaaaaagactaaa

SEQ ID NO: 3677 - DNA, 124 bp, Homo sapiens
actgaggaggtctcagtgtataaccctcctgattcattgtgtggatccagccggtctccaattcacagagatccttctgcttctgcccccagctgagctgcgattaaaagcatatgctaccaaa

SEQ ID NO: 3678 - DNA, 131 bp, Homo sapiens
aactgaggcttgtctgtgaatgtccaatgaacatatgaaaaatggatacctgcactggccatcaaaataatgcaaacaaaacctccactggatcccatgtcctggcagtcagaatatcaaaagaaaacaaa

SEQ ID NO: 3679 - DNA, 238 bp, Homo sapiens
  misc_feature (1)...(238): n = A,T,C or G
tttactgtgttgcgctggtattctgganttcctncatctgcagaatcccangccatattttgagaganaangnggcatnacnngcctgatcgcnctggcccagctgtgnagcttcgtagagacgcnaattctatanggactcctaaggagacgtntttaacgtttaacccaggtnctgtgangattatgntgcttataaaactggaagncactggnccgancgtggtccacccttaca

SEQ ID NO: 3680 - DNA, 187 bp, Homo sapiens
  misc_feature (1)...(187): n = A,T,C or G
gactgagcttctgcanatgttaaatgantgcagccgcctgagagccattggcctatntgcatcacantncnaaggactaaanccacaattaataaactatttccagtcagcagtcacactgaggaaatgaaggacgttcatccgggaactggaaaaaggccgngcttttatttgtgcccttttggac

SEQ ID NO: 3681 - DNA, 487 bp, Homo sapiens
  misc_feature (1)...(487): n = A,T,C or G
gctggtggcccagccatcctgagaggcacccngntgccaaaggcatgtccagcaggctgcacagagggatgcagnagggaaagccatcaccatgctngcnttaaagataaaggtggacntcntncccaccagtaccacngtncangaaagancctggaatggagatgcttgcattgttgtccacgtcnntgnagtanacaaaggtgnntaggcncagatcctcaccccccagtttgtgcatgtgctgaggaccaaacctgaggttctgctcatgctaagcaacaactctaccagcagagccacatcccagccccacggatcacttctgagcagctatcaagcatccacctatagagatcacagacgtttctgaagtctgaggttacatggacctgtttaaaaaatcagtgacatttgctgcagggtagcactctgccaaacagtgttgagaaggatcanaaatgccttcataggcatcacagcatgg

SEQ ID NO: 3682 - DNA, 133 bp, Homo sapiens
  misc_feature (1)...(133): n = A,T,C or G
gactgagggatgagangtatttggncatggcgcccagtggagggaagagactatttcacagtctttcaaacaacacangcattgngcagagagtgccatctgccacacccttccccattcctctctgtcctca

SEQ ID NO: 3683 - DNA, 117 bp, Homo sapiens
  misc_feature (1)...(117): n = A,T,C or G
gactgaggaccctgtnacctttncggttgtggctgtnaacttctgcctnngngagtgggctctgctggattccagncannagangctgtactgagatgttgatgacgggagaccttt

SEQ ID NO: 3684 - DNA, 233 bp, Homo sapiens
  misc_feature (1)...(233): n = A,T,C or G
gccgtggggaggaggggagggggggngncggtttttnttcttncccatnaanatcttcttttttngntnttacattttattcantttttatatntattttaaccttctnctcgtccctnnttatttncnctgtcctcttcctntcctatcttannccccttcctctttcattaatntcccatgttttgttttttttttacntnattnttctttatttttattatttcattcct

SEQ ID NO: 3685 - DNA, 289 bp, Homo sapiens
  misc_feature (1)...(289): n = A,T,C or G
agtgccctgcaaaagcatgagngctgcaggnagnntancaanancggcnctatnggagaattgttgangcaatgggctcatcctacatgaatganaangccaaggtcctgacggctcaccagancngccagcttnnanntgnngccccngggtgggaagcaccccnaagccttccactctanaaccctcantcccagaggaggacagagagggcanngacctganacctgtggtcatcgacggaagcaatgtggccatgaggtatgtgtggagacctgtggaatagtgt

SEQ ID NO: 3686 - DNA, 144 bp, Homo sapiens
  misc_feature (1)...(144): n = A,T,C or G
aggatggaccagaggggaaggtcttccttctgatcccctctattagggggaggacctcgtgaggagagacctccgccttctgcctctgtaggcgctgagncttgcgtaccatacggcgaaccctaccgtgcaggatctggaaat

SEQ ID NO: 3687 - DNA, 183 bp, Homo sapiens
  misc_feature (1)...(183): n = A,T,C or G
actgaggcgggcccgnggcaggtggtcatggncatggccctgcatcgngttgggatcgcggagtaagnncggnagganctacctctgcttgctgcaggcagtcttcctagcagaaactgggctgctcctccagntanaggncatcaggtcatttcctaatgcangacattgctttcctgtctg

SEQ ID NO: 3688 - DNA, 323 bp, Homo sapiens
  misc_feature (1)...(323): n = A,T,C or G
attttcaagctgccgtattcatgcagggatgtaaaactgcaggctactacctgtacagtgcctatggttatacattatcacccatggagaaagccattgtgaanacaggcattcaggtaaagcactgaaaaagcacttcatagatgtaggccgctggtgttgtacacngaagatnatagaggaaacacttggtgtnatgcgtgnttaattttggaanacagaagntngaggnganaaanggngatcanactgcgcanttnatctgngagnanagtntggatncagacttntaggangagnaaacactggatgagagaggcccc

SEQ ID NO: 3689 - DNA, 264 bp, Homo sapiens
  misc_feature (1)...(264): n = A,T,C or G
actgaggtggtgtcatggatncagcantgtctgatgtatacaggaccacaccttaactcccacccttgccagcatgtcttatgnaatgccgaatcaacacaggatcnganngtncnttgctggatgaagatgattnttttttgaactctggggatctngnaggaatcccacaccgttagtagnagacantgaggatgagcaggattgnagtncaacaggacagcgcttgtttnttcagttcacactgagggtagttctggaagt

SEQ ID NO: 3690 - DNA, 105 bp, Homo sapiens
  misc_feature (1)...(105): n = A,T,C or G
ccaggtgggtcttccaccattgatgtnctaangcgctatgcatctagnnctgncatcaagtganttgcntacagntgatgaagacctctgctactgcttagagtg

SEQ ID NO: 3691 - DNA, 172 bp, Homo sapiens
  misc_feature (1)...(172): n = A,T,C or G
tgaagagtactacttgaacacactgtgccacccatcacatgnatggcctctagnangtntnaatgacccccatnccacatgntatgnaccttntgatggnacattcannnagctgnttcctnagnggtgggatacggagtcctcgaanctttcaaattgactgaaaatttgg

SEQ ID NO: 3692 - DNA, 290 bp, Homo sapiens
  misc_feature (1)...(290): n = A,T,C or G
actgaggaaaactggaacagacggnnccaggtccacccgaattattggatggcagaaataaggacatctattgatgctaaactaactgacgatggctagaggctttgacaaaccagggttcatgacctctgatgcacacctccccacggagactctgacaccanacaatccagccactttggagtccatcgcacatggtaatttgacttcaaaatgcaaaccactgtgaagcccccagaactgttgttatttctggccaggacctttgtgagattttcaacaaaaaaaaa

SEQ ID NO: 3693 - DNA, 210 bp, Homo sapiens
  misc_feature (1)...(210): n = A,T,C or G
agactgaggctccaaagaacactgagcgacccggtagcatttcctgccacactccagagctggtgtgaggggcatcgatggcggagacggcagctggagagcggtggtggcggngactccggngttgncgcgtncgaacggngggtgncgcccattaaagctcantgantcncatgtcagcttaatnagctgaagctgaaaaaaataaaa

SEQ ID NO: 3694 - DNA, 440 bp, Homo sapiens
  misc_feature (1)...(440): n = A,T,C or G
aacttgaggtaagtgaggtcttgacctcagatccaggaagcttcagagctgcaggaacagcctcaggaggagagaagaaaaaggtctcacaatacctggagcgagtgacctgcagctcggctgctccttttagcagagtgagtgcaaagccatacaaacaacgcactctgcactcgctgtctcaacaagtgttggaccaatttccttccacnnanaaactntnaanacccngccccngnatcnttgtgatcgcagcatccttgtgctctgcccagctatggaatccagacagcctgtgattgtttcagctccaatatctgcttaccaagcaaaatacctccttccccatcctgactccttccaaaggccaactttgtggactcaaacacaacaaaggcaaaagcgcccagctgtatccatcctgggggtcctatctcact

SEQ ID NO: 3695 - DNA, 403 bp, Homo sapiens
  misc_feature (1)...(403): n = A,T,C or G
agctcgacctggcctgngcnnntgacatntctctactcaggggtttgaagtttgccaagaggtggcagaagcatggaaaggcctcccacagtacatgcagggttctgtgtgttctggaaacagcacacgggtacttctcttcctgtcagggttcagggtgttggggaataggagttacccaaaggctgggagggaaggcagaggccagtcgctgagcatcagtctgatctcccatttgagcctgagtgcagagagctgctggagaaaacanaaccatggggctggggtgggggggtgttanatcgtttgntcctctggcctttggatggcgctgnagtctgtacaggccnntctgaaggcnnggcgctncatgtcttccagccagcacgtactggagatggac

SEQ ID NO: 3696 - DNA, 226 bp, Homo sapiens
  misc_feature (1)...(226): n = A,T,C or G
aactgaggtgctagagntggctcttcancacacctgntagntanctgctctggcttcctgcccttatcatctctgtagccagtaacctactcactcatgatgtgcattggtnctgacagctgactcctgagaangcccctcaccttcacattgntaccatgtatctgtacttcctggagcagctttgaccacatactcggcacctaataaacctctgtggaatgtg

SEQ ID NO: 3697 - DNA, 476 bp, Homo sapiens
  misc_feature (1)...(476): n = A,T,C or G
ctcatgtgctgccccgccgtgcnctgttgntgtgganctctgatanganccccaganatgcacctactnagacngtgtggcccaagaactctgtgcaggccccaggccgacaaggagagctgaggttggcaccagagtcagctgagtggaatcaagacagagagggaagcttgcaagccacggtgacatcgtttggatctgagccaattgatactgaagccaggctttctctgggacatgacctaacagattgatttttgacttttagccagccaaacccggatttcctgtggcttgttccaacagggtctccacggactcatggcctatatggcactgctgagagataccacagttcctgaatgccttttccttcctccccaggaagcctcaatcttgaaacaaaaaggcaggncaaagttggngtttttcaggtgngatgatatgagactgtgcctatcatgggcccaagaggg

SEQ ID NO: 3698 - DNA, 440 bp, Homo sapiens
  misc_feature (1)...(440): n = A,T,C or G
actgagtgctgtgcagcggtgtgggtatgcgcatgggactcactcagaggctcctgctcactgacagangaagacaaacccacggtgaagntnctgcntgcctgtatatccacaggagggcgtgnagnntnagnancccntgnnagtggagttacagacattngcaaaccacccgtgtgcctgcgtgngaaccaaaccccgnacggncnnctngangggnaggtnatgttcttnaccatanagccatctctctanncntgangggtgganattntnanctttatacccacaaggatatggactttctcttgtgtctgaggggctgcttgctaaatagggtagccagtgtttgttgagtggcgtaaaggatcctgggccaccagggtgctgttcatcacttccttccatttacccantanatgagtggtgtttggtttttg

SEQ ID NO: 3699 - DNA, 162 bp, Homo sapiens
  misc_feature (1)...(162): n = A,T,C or G
acgggaacgcaggccagctgcctctcaagctgttggttctgggaatntgancttgnggcccaacttttacagcaagcctantgagccatctcctaagacccatgccaaatagttttagctgaacaaacacttagtaataaacacaagtaataaatgctaaaa

SEQ ID NO: 3700 - DNA, 113 bp, Homo sapiens
  misc_feature (1)...(113): n = A,T,C or G
gcactgctcacaggctggactggaanctacgnattgggtccttgagaancaagcgggttactgnaaaactgaccctgactcctcattcactgaagttcattgtggaaaaaaca

SEQ ID NO: 3701 - DNA, 145 bp, Homo sapiens
  misc_feature (1)...(145): n = A,T,C or G
ccaacggaccgtgtgtccattcgagcatcgaatagtaggcgctgtacgagtccgttncagcgattacgcgtgggcagaatgatcgnccttgaggccggcctgagcacgaccngccnnaagaggggctggagaggccactttggca

SEQ ID NO: 3702 - DNA, 357 bp, Homo sapiens
  misc_feature (1)...(357): n = A,T,C or G
gactgaggtgacaccaggcnctacgatnggacngttgtaggagncagacnctnggcctngccaggagatgctntgacntggntggngncnactcagagagcanataccagtgccctccngctgcagcgccagactagaccggtgctcggcacacnaaggcctcagagcgttcttcatgccacacagncnagcccanccncttgncgnatttccacagacaggacttananctttcagagctgcttatgattggaggaggggcctggagccttcgagacagcanccagccagccacaaacccnatttgtagtntggctcctctataggggatgagcagaaatgcaggaaccacacccc

SEQ ID NO: 3703 - DNA, 397 bp, Homo sapiens
  misc_feature (1)...(397): n = A,T,C or G
gatccttggtgagctcatcctccaaacgctnggaaagggtctggatgttncggaaagagtccnaggagcacctgcncacagcanncagatggcctgaatcaccaggctggggacacacccacagcccgcagccctcctgtcncggctcatgcaatgcctgttgaggcgtccccgggggcccacctgtggacggtggcagtcaccagtacccgcagaggaatttttaccagtgagcaagtaggtgatctcaaaggcatgcttgactatgcaaacggtcacgagcttcgtgtatcagcacggagtaagggaggtgctccgggatggggctctgtgatttacataccgcgctcctgtgtggggcagggacttttccagggcaatataatcctgaagagaa

SEQ ID NO: 3704 - DNA, 247 bp, Homo sapiens
  misc_feature (1)...(247): n = A,T,C or G
acactgggatccagccctctgnatncttgtccttnaccttttcatcctctgtacggngctccagancatgtcngngccntatnctttgcagtgaatactcaggaagtcaggcnagaggcttgtanctnctaggccagctgaggctacacagngaggtcttgtctntaaaacaacactctaggttcccattgatggatctgggtgggagctcagactctgaataaatctttatgctcaaaaaaaaaaa

SEQ ID NO: 3705 - DNA, 147 bp, Homo sapiens
  misc_feature (1)...(147): n = A,T,C or G
ggagatccagttttcttcanagncgaaanctcagggcaaatgtaagatgtgcttcagcggaggagcaacatctactgcaaatctccttacatagcatcactgttgccccccacttcatgtnggacncacatttaaaggaaggatttt

SEQ ID NO: 3706 - DNA, 276 bp, Homo sapiens
  misc_feature (1)...(276): n = A,T,C or G
cgctccagaaccgaagactagaccacgaggngtaagggaaatctntaccaaatggggtttnaccgtcctctctctctttccgagagaagntgnctaagacccacccttgaacttnaatactacctcnataagcttggnacggcnngccancatgtgcttgannggtcntggnaggagccctatggccttggaggccttggcagnnccnntgncctanggtttgtggcnggatggctttagggaanaaganagccccccctccctcccttttcttac

SEQ ID NO: 3707 - DNA, 302 bp, Homo sapiens
  misc_feature (1)...(302): n = A,T,C or G
ggccatgcgtccggatgcagntcagggtgaanttaccctgatgngcccctnacacatctgncggtcaccatccaccatcnaccgagnggncaacgatgaggcgtgaatggcctncagcanctgcgttcctgagtgacagagctggnattgctttggcngccctggacccgtgtgtgcactcccagggcatgcntcagctgngagctgtgagccctaanccannacagcctttgaactgangccaatctccatggntatgncctttgacacattgccngggctcctggccagcatggccctgg

SEQ ID NO: 3708 - DNA, 327 bp, Homo sapiens
  misc_feature (1)...(327): n = A,T,C or G
tgagggagtaactcggcanagaacttccggtganattccggctgcttcttgtcacttctgaggactccggctgattggcagagacttgtggtttcttctgaatcgagcctcaactagngattcctgtttggtgnntgctgattagactggaccgccgctatcttgataacaaagatttcgatctcccccaagaactactttctaaacaggtctacaaaccctgcttcctaacctttctttccccctacctctggtgggtgggcttagaagggaggttgaaagcttaaagaaccctaattaaataaagtaggttttgaaaaaaaaaaa

SEQ ID NO: 3709 - DNA, 198 bp, Homo sapiens
  misc_feature (1)...(198): n = A,T,C or G
gactgaggatatgaaatatggaaagtccagccagaaaaagacagtaaggttttaaaggccangaaaacaatgcctacaagttaccagaagcagttggagatcctgancaagtcaacgaatgttgaagctccaaaaacaacagttggaactaatattccaaatggtcataatcagaagatgttttcaaaaaacaaagaa

SEQ ID NO: 3710 - DNA, 107 bp, Homo sapiens
  misc_feature (1)...(107): n = A,T,C or G
tgtgcacacaaataanatgggttnctctatatcctnngangntgggacgagcagnagacattncttaactgtngagctagctntccagccctgagattaaaagcttt

SEQ ID NO: 3711 - DNA, 315 bp, Homo sapiens
  misc_feature (1)...(315): n = A,T,C or G
actgagccgctggagccgngggtcctgggactcaagtgcagccccgtggtgaaattcatctagcangcactactgtgaggncccccaacccagactgangngtcttgncacatcngaacnagnangcnttgcangangagaggntgcacagntggccctcgtggatatgnctnggncctgngttggacctgggagcactgcantctgnatcnttttgtacacgntccctaaaaatcntgtcnntgntgctgncaggaccctcagggaagcacctagctgctcaataaatttctgtaggaatgagtgagggaagga

SEQ ID NO: 3712 - DNA, 200 bp, Homo sapiens
  misc_feature (1)...(200): n = A,T,C or G
cctcttcgtggcctatgagggcgccncccatgcacacnatgcgnagacatatatcnatacactttnannaaagatctgatttttggtactccaatntccacgagctatggtgtcctcttctggcctctgtgggcnccacccatgcncaccatgcncagncatatntncatacccattaaaaaaagatcagatttttaata

SEQ ID NO: 3713 - DNA, 484 bp, Homo sapiens
  misc_feature (1)...(484): n = A,T,C or G
gactgaggagtctgtgcctccaaattgtttgatccagtgagactgcaaggaagaaaggtctctgaggcctctgtgtgctgactgtatgacagaccccaaaggagatgccngttgtgatggcccggnacctggaggagacagcatcgtnctcanaggacgaggacctggccaaccaagaggatcacccatgtattatgtggactggaggctgcaggagaattccagttttggttttccatgctgaggctattttgacanaggacaacaatattcgagtnattgnanagcgttatnattngtcttataanattgtgagaacggacantnncntggtgcnaagcattctgacagcccatggatttcatgaaggttcacccnagcagcactgactataatttnangtngacaggatncnacctntaaccntncttacttcgaaccctctctgaagcacaaaaggtttaatcatttccccaggtcttat

SEQ ID NO: 3714 - DNA, 122 bp, Homo sapiens
catacgtgtgtggaagtcaggggaccacggccatcgaaggagtcctgaggattaaacccaaatatcaggctcaatattcgctgcccactgaaccatcccactccttcataaaaccaaacctg

SEQ ID NO: 3715 - DNA, 324 bp, Homo sapiens
  misc_feature (1)...(324): n = A,T,C or G
gactgagatctctgagtgctggtaactgaaatccaatcatcaggaatcccagtgcagcaggatgttaaagaaaataaacaacaaccacacaagatgtgtcctggcaagccgtcaacctggtaactctctttctgcatttggaggacttggaattctcaagttgctaaaatgtacttgaatgcttgggaatgtgcccacnttattaatcattttatttatttgtgtttattggataatgtttacataattgtgatcatttcctcatttatgtaactaacatttttttcagatttttcattttattaaaaaagagagaatcattgt

SEQ ID NO: 3716 - DNA, 191 bp, Homo sapiens
  misc_feature (1)...(191): n = A,T,C or G
ggactgagagaccaanggactaggaaacagacacccgccatgactcggttcgaaatgagggctcgtctgcagtgctcgtgattttcccactgcctgtcgccaggccttgaggactctgtacagaaaatgccttaattggagtccaagctccacctcacttntttttttaaaaaggtgtttttttgttgttg

SEQ ID NO: 3717 - DNA, 380 bp, Homo sapiens
  misc_feature (1)...(380): n = A,T,C or G
gactgaggacttagaggtactctggtaggggctctcctgggnatgacgaagttttcaggcatcttggtagtggtggaatgtccattaggtggccactgatgcttntgatgggccatacaccaagatncccacagnctaggacagantcaaggtccacactgctgtgggatgtctgctgnntgagatggagtcaaggcctaanacttgttgcaactgcccatgaatgattctggttngtgncanaaatancnagncnnaaccgggcnntcttcatgtcnnngggataggnncgtggaacaccanttgncccactnaaggaggncnngnangcanttacatntgctactcntggtgatgttgtctgggtggactgccttatc

SEQ ID NO: 3718 - DNA, 113 bp, Homo sapiens
  misc_feature (1)...(113): n = A,T,C or G
ctcaaggggaccttggcncagctggctagcccacagtatcatggcagcagattatattggtgcccttttgctaattggacctggtgctagggaggtagccagaatcctagctg

SEQ ID NO: 3719 - DNA, 334 bp, Homo sapiens
  misc_feature (1)...(334): n = A,T,C or G
caggggcaaccgtaacaacttcngtggcttgacttttttttnaccattggtattgatacttncnttttccttnggccccttnccccttnccccttttgccttggggccttggggaaaacctttttncccaaatttnaacctttggganncgggggccnggggggaaagggggganangggggggncccccaaggggaaancccccccccaaaagggnaaaaaagggggcctttttttcccccccnaaaaccccccnaaagggggaaaacccttttttaaaaattttggggcccttgggggancncncgcccccccccaattgggggaaaaaatc

SEQ ID NO: 3720 - DNA, 305 bp, Homo sapiens
gactgaggattaaaggcctcaactggatccatttgcagttggaactggatcaacacagagacttgatgcattagagtggccggcaaacaagcaatgccatttaatgagcaagcaaagttcttgtgctatcatggggaaatccttgtctttcagttgtccagaggagagctgtgcagatttagaaatgcctacagatccactggtcttaggtgtcaaaaggatgatgtttgacagagaaactagtacattccttctgatatccactgtttttttaaacatcaacgaaaaagattctcatttaaaaa

SEQ ID NO: 3721 - DNA, 150 bp, Homo sapiens
  misc_feature (1)...(150): n = A,T,C or G
gactgagggacatcctgcgcgcgtgtcggggtctcaggagagagagatggcgccgccccagcgcaagcgagngtggataccacgcattcctcggcctgttctctagcagaggaaataaaatttcattccctttggtttcaaaaaaaaaaa

SEQ ID NO: 3722 - DNA, 157 bp, Homo sapiens
  misc_feature (1)...(157): n = A,T,C or G
gactgagctttgcgaacccatctaanaccaagtcnaggctatatttaagctcagagantcttttcggancttcttctgagcccctgttctgncctnatcacacgngnggatnagatcccctgggggctntttgtgaacatacatgtttaaagaaata

SEQ ID NO: 3723 - DNA, 155 bp, Homo sapiens
  misc_feature (1)...(155): n = A,T,C or G
agccaccactaagttngctgtanangtagaacatcacgacctnnngangancngtggaggncttgttacacgcgtgaggcatntgccacngccccctaggaaactttttacaanttagaaatanatgctactacattcacttttaaaaaaaaaaa

SEQ ID NO: 3724 - DNA, 246 bp, Homo sapiens
  misc_feature (1)...(246): n = A,T,C or G
agcttgcttgtacctcttcatcgaggggtaacataggatcttatactggcctggagctngcccagttgggagaggctgtgggctagccancaaatcctaggaanccgtccaggctccncttccccagngctnagatagcaggtatgcgccaccacctatagattatcnggnnttgggtatccgaactggngtngtcaaggnttncgaggaagcacttctctaacagagncattggcttagcgctcc

SEQ ID NO: 3725 - DNA, 416 bp, Homo sapiens
  misc_feature (1)...(416): n = A,T,C or G
gactgagagaatcctgcgacttcctgtctgaaatccagaggcttctcctgaggacctggaaggttgtagtattggtaagctgctctctggagaggggaatggggttcgcactctgtccagcaaagtcgaaatcaccggacttcaccttaaagcaggnccaggacactagcccanggatccctgcagancctccctctatgannaaaangncnccanattnnnggaccttgncnaanctnnaaacctaangggctgnngagatggcttncctgncctaaggagcttgctagcctgcctggnnagaaggagttagntncctaagaaccacatggaggangganagaatcancnctcaggagntgccctnggacctccacattgnaacctgngggatgcacccccataaataaaaggag

SEQ ID NO: 3726 - DNA, 420 bp, Homo sapiens
  misc_feature (1)...(420): n = A,T,C or G
gggagctggaaagaagtccaatnaaaaccancagttttctataannaagtgnnatatgancctntatgcngcaagcccgcgggagtganangccgctagnacctgngggcagattgcagcagcacaatggcccctatcttccaccagcgccaacgcaccgcccactcacggggaaagagagccacctagtgagaaactggtcacatctctggagngtagctttctacctcaactctggaagtcanagaangggaagttactactatatatactcananattctactttttttttaggtngnattcagggggatgaatcccattatggccacntacncacncanatnttttatctaccttcnccattgnttncctccatactacttnnntccctntnttccttgggctctccccctcttag

SEQ ID NO: 3727 - DNA, 235 bp, Homo sapiens
  misc_feature (1)...(235): n = A,T,C or G
gactgaggtgggcctgnggtgnggatgncctgaccttggcgttntgannnttnngtgncactctcccaananctgngnnngcncanngcacgccncccatatccagttttatgcagtgctggggactgaactcanacactggtgcatgctaagcaagcattctggtaactgcgtacctcccagcctgtgtagagtgtttggagagccccacgtaaagtcacttggtacagaagaa

SEQ ID NO: 3728 - DNA, 272 bp, Homo sapiens
  misc_feature (1)...(272): n = A,T,C or G
gactgagggaaagaatatgaaatcggnttcttgttaacactaaacacagcagaaagtcccaagagaattgttgacctgaaagtgacagaagccggtgagcttggctgacgacataggggaatgcctacacctcagtttaaacaaagcccgaataaaacgcacagacgaggactgtgctactccaagtaccatcagaagagtgaaaatatctgggcctgttgctcaatggtgaactgcaaggcactcagggcctggcatactaagagaaaagg

SEQ ID NO: 3729 - DNA, 263 bp, Homo sapiens
actgagcttggaaggtgcctgtttgtgctactggctcttcctgttgagaactggaagatgccagcacagtgtggaagccatactctccagcaagtgtctcagccacagacactgcatctccctgcccagagtcacccctggctccagggcttccccacaacctgctatctaatgttccacacgtaggacccaaacttcccagaaaattaaaagtagattgtgagagccctgctttagggtttcctcatctgtaaaaaaaaaaa

SEQ ID NO: 3730 - DNA, 460 bp, Homo sapiens
  misc_feature (1)...(460): n = A,T,C or G
gactgaggagtctctccccagggccacannaactaagngagactcggcaacaggctgctgcgaccaanccaccaccgtccatctgcctgccgccatnctnggntccctnnntnccccngantgctattnctgnnctcccatgtggntgatggcaggaagcctntgggcctagaggancttgcgaagggagaggnatgagngcagctntgggacagccttggnggncttgnanactatctatctagnnctactggaatanggagatcccacttggntgancactgaagctganccnaagcaagccatctgnaagccatctaaagacaaanggnagaaaaaggagggggggcnttnatctnagccctctgncaagggcaatcccaggggtggnagnatnctgcatgattcctggggcangaggactgagcccatcctggntagacctggagaggccccctaa

SEQ ID NO: 3731 - DNA, 115 bp, Homo sapiens
  misc_feature (1)...(115): n = A,T,C or G
tctggcttgtaccctgctgcagacatgtctaacagtancactactcangagactctggaantaatgaaagaatcagaaaaaaaactnttgggaagantctgtaaacaaaaataaa

SEQ ID NO: 3732 - DNA, 521 bp, Homo sapiens
gactgagtgaggtggcaaacagcagagtcaacaggggccaggattcagtcttccacataaaacaagctttaaaaggacaacatggactaagaaaccgatggggaagcactgcacacagaaacaatggaggaatatcagtgatgtggacaataaacgaagtgagcagcgaactcccctggtgagaaaccgttctggcacagaacagagaagggagacccgagcaagacctggaggtcaacctgagacgaagccggggccctggggaaaccaaggcagcttcagttcaaaggacagtaccgaaggaccagagaaatccacagaggttcagtggctccttcctcgggcgttcaccgaacactgacagcacgcgacacacagctgtgccatcccagggaaaagtcccgggaaaaatgtcagtgggaataaagggggtgaggaacaacacctcttcctatgaggccataaagccttcagagttgtacataatacctggaaatggtttcatcttgataggaagacaa

SEQ ID NO: 3733 - DNA, 184 bp, Homo sapiens
gactgagcaaacaaacccagtagtggaccacagttctggcatgatcttgaagatagtggtggcagaggagccagagtctgcaggctacagaagaacctaccacaggctcggagacctagagcccgtacaagatacagctttcgatgacagcagcacacgctccttttttttttttttttttttg

SEQ ID NO: 3734 - DNA, 425 bp, Homo sapiens
  misc_feature (1)...(425): n = A,T,C or G
agcaccttttttaggcanaccaanatnccctacagccaccancangcagcatgatgtgcantcgcgccaacacccctgcnncnccnaccannttgagctgangncctgaccatgtnnncnngnctaaaggnctttgaaagctaanacgggggtgncnncattactnnannaatggcnacgtaggncacataaccnncaccggantttnnccatgccactggcagctttgcancacccagctngccaactgcagcctcacccccaggaggcccacagcatcaccagntcgaatccgtccctgtggactctcggcaccccnttccccgacttcagactggcntcccctggctactaaacaggacacctganaaccaagggcccaccctgccatggaggcagagagataagggaggcccctcccccct

SEQ ID NO: 3735 - DNA, 172 bp, Homo sapiens
  misc_feature (1)...(172): n = A,T,C or G
gcgtgcctagttacctcattctnnccacgctccnagagnagcntgggacatgggacactcccntttgtggccagggcccccattctctctgtggggctgggggttctcagtgggattgncgccttcctcgggggggagaaatttgggagacacgnggaaaggaggaccgggg

SEQ ID NO: 3736 - DNA, 174 bp, Homo sapiens
  misc_feature (1)...(174): n = A,T,C or G
gaggaaagcagatcatcccacttgncccccactgtccactgctgccnttnattaaacctgcctctttctgcaggnatggcggagcagaatnactgacttgtgaaagcnctccaggcccttcctacangcctctgggacaaccaagacggtggcctttcagagctgggattgaga

SEQ ID NO: 3737 - DNA, 332 bp, Homo sapiens
  misc_feature (1)...(332): n = A,T,C or G
agaagatacccctctnccttctgttcntatctggagcatnaannctaanatntgacngncatntatagctatgtcaaatagaaanagttagtganntgctagtttgncatacctnagttatnaaggagntagaattgtttntgaanctactgggctgntatatttatttgttgaggtcatgaaaattaagaattanaanacatatttgagccaatcaacaaatattcatatctttttaaaatagcttgngtaaagaaanacttgaagagttaaactcggcgcacagcttggccactagtcganngnagattctcagtctgcttccctagctg

SEQ ID NO: 3738 - DNA, 295 bp, Homo sapiens
  misc_feature (1)...(295): n = A,T,C or G
gactgagactcctcacgctgaagcacatcanattgtctatgctagccgaccagtgagctgcaggatcctcaagtttctgctcctcatgtgtcccctagggggtgttgggantacagatgtgtgccaccatcctggctttatgaaggcatccacctcanaagctcacagtgtgcacgatagggcctcactgtataaccttggctggccttggacttccagtcttcctagctgagctacccgcatactgagattacaggtttgctccacagtactttctctggctcaacataagaag

SEQ ID NO: 3739 - DNA, 178 bp, Homo sapiens
  misc_feature (1)...(178): n = A,T,C or G
aagcttgagcgcctggncgaggtgacatggcctgccgtgagtggangagggctgatangtatataagagtgagaggccnggnncagagaaggaacactgannaagatgagaaagttgaagcgagagagatgancacngangattgctgaataaactgctgttagaagggagaaaaaaa

SEQ ID NO: 3740 - DNA, 126 bp, Homo sapiens
  misc_feature (1)...(126): n = A,T,C or G
tttctagcccatcgtggaggaacaaggagngagcnttcccatctattaaaggnatgcanaccatggcngaagcatcttgntacttgtgtccctgatagcnntaaaaacnggattccttgacaggcc

SEQ ID NO: 3741 - DNA, 137 bp, Homo sapiens
  misc_feature (1)...(137): n = A,T,C or G
atcgttggacctgatcatanggaacgngcgnncccgaaacanacgcctgttttntctntatttgagggncagtancaaatcctggggttctctgganggacntccanacaggagccnctgggagtggggaaatggct

SEQ ID NO: 3742 - DNA, 439 bp, Homo sapiens
  misc_feature (1)...(439): n = A,T,C or G
caaggatgggaaccgtacgtccttcatggagccagcgnccagncngaancnggcctnggggctgnccgngacacataccatcgcncannacagcnncccccccacaggggggangngnntnntntgactgggtcacangctctcgcctgatgtttagggacncagggcacaactggcaaccgttcaatcaagaaganagcntctgggtaggaaanactttctttttccagtgaagaaagatgagatatgtaaatggtaaccatcggaatgtctctgtcatcttactgtaacctgattgggggggagttaancactgncctgtgtcattcagaaanaatgagntcatatntagggctctgattnccaggngnagctctattccnaagggaanaaagagtattanntnngttttaccctctttntagcaatttcaataatt

SEQ ID NO: 3743 - DNA, 160 bp, Homo sapiens
  misc_feature (1)...(160): n = A,T,C or G
ccccccccaataacccaggggtttcctttttccnaaannaattnccccccttggttgggaaanttgggaanggcctttccaanaaaaaacttttccangcctttttcttggggcnggggttccccaaaccattccccccaaggggcccggttggccggtt

SEQ ID NO: 3744 - DNA, 216 bp, Homo sapiens
  misc_feature (1)...(216): n = A,T,C or G
gtttcatggtttttgtntgctatnattntcgatnntaaanaatttataagaatttttgccattttnaagnactaagcatgtgaccaacctgctagtctntctgggagaacangtgcttttcactaccgagccttacctccagaccctcatgnaganactaaactcataagagtacaacncngancnncacctccccaactttgaaggcttgactca

SEQ ID NO: 3745 - DNA, 235 bp, Homo sapiens
  misc_feature (1)...(235): n = A,T,C or G
ttacagcacagctgtgnatcacaccatgtgggtnntgggaactganctnngaactntngnaaacgcanccatgtgctcttcanggcgtgagccatctctcctgcnctctattnagganttttttnacntgagaaacntgtgtggaggccctttcanaacctccatctgaactgagaacatctggaacgaggtgtgtcttgctatcaaagatggcctcattttgcaaaaaaaaaaa

SEQ ID NO: 3746 - DNA, 361 bp, Homo sapiens
  misc_feature (1)...(361): n = A,T,C or G
gactgagagcaagatgcnggtactagcggtattcacnttcaacttcatcaatattcatnaggaaatgctgccattcccagaccagcatttgctcagcaaagcactgnnncacaggngcacatanaaaatggnnaactgtcaagacagccagccctgaactgtgcnncaggcccagacggcttgcttgggctgcactgatgttgactgttttttcacctaagtctcatccaagacaaagttacattcnttctgtgccttgcctatgcctcgcctcccnccgtgtgtancagaaactntnctgcctatatttcaagacgnntacgtctttaaaaatananntggtggctgagttttaaataaa

SEQ ID NO: 3747 - DNA, 340 bp, Homo sapiens
aacccgaggacaccgttaacggacaagcctgttcaactctcaaattactgacatgatgtgtgcagcatgcagaaagcaaacgtgaagccctggtcctccacacacgtcaaattatgaaaagctcatgaaagtgggtagaaaactggagatttaagaagacgtgaacacctgctttccaaatgagacagggcagaagtgctggggcacgtgaaggggaaggcgaatgaagtcttttttatttttttctatcagtcagcttatcttatttgcaataaattcttttaattgtagccattataattattaaagttctttcaactttgatttactaaaaaaaaaa

SEQ ID NO: 3748 - DNA, 278 bp, Homo sapiens
  misc_feature (1)...(278): n = A,T,C or G
atatgaaccaaggccttgnntgactcttatgctgggcaacntgaaatctgctagatttgaggaagctctacacaacatccatagaagcctcgctcagatgtagtacttgcagtgccacggccaatcttntcccagctctacttggacccagaccnancccctttctccactgnnaaacctgntgnngcggcgcctgancctgctccanaccncatgcatcnangnctttnaagtgggacggggggntntttncccatggaaaaataaaatggaagtgg

SEQ ID NO: 3749 - DNA, 205 bp, Homo sapiens
  misc_feature (1)...(205): n = A,T,C or G
cacacaccaccgagccnacacncncttanagaccnatgctgcaccatctcatggcccagcccttgagtggacagcactgaggcaggggtggaaagtagtatatacctggaggtctttgcccctaatgtgctatggggccattcactccagtgctgcctcctggctggcctagcctaataaagtgttgctaccccaaaaaaaaaaa

SEQ ID NO: 3750 - DNA, 543 bp, Homo sapiens
  misc_feature (1)...(543): n = A,T,C or G
tactgagatatgtgcaagaagccaaagaagcagctaagaatggagatctggaagaatcattgaaacttttcaatttggcaaaggacatttttcccaccaaaaaggtgatgagcagaatccagaaactccaggaagctttggagcagttggcagaagaagaagatgatgatgaatttatagatgtgtgcagctctggcttgcttgctttaccgagagctgtatgagaaactctttgagcaccagaaagaaggcatcgcttttctctatagcctgtataaggatggaagaaaagggggcatcttagcagatgatatgggactggggaagactgttcagatcattgctttcctgtcaggtatgtttgatgcttcacttgtgaatcatgtgctattgatcatgccaaccaatctcattaatacatgggtcaacgaatttgccaagtggactccaggaatgagagtgaaaacctttcatggctccagcaagagtgaacgcactanaagcctgacacggattcaacaaaggaacggcgttgtgatcact

SEQ ID NO: 3751 - DNA, 178 bp, Homo sapiens
  misc_feature (1)...(178): n = A,T,C or G
ctgctccttgcactgctcgcccttgcctggatagctcagtacatnccctcactgcattgtgcgcctactgnttnaggattgcatacacgcaccgaanaccagctnagacatacagncctggaggactgaacnatannangtgattcttgnacatntacacgtcacagcatagcctact

SEQ ID NO: 3752 - DNA, 204 bp, Homo sapiens
  misc_feature (1)...(204): n = A,T,C or G
tgagagagagatgcacaaangaactggaagccacggccacancagctcccaactgagccatcagtgancctgtatcntagagagaagatatgggacaatgtgtagcctgacgtacaggagagccaccaagctgaagctcacgtaaagtgatatctggggcagcctgctgtaacacacacacacntacattgccagatctacaaa

SEQ ID NO: 3753 - DNA, 474 bp, Homo sapiens
  misc_feature (1)...(474): n = A,T,C or G
ttggcagctatgggatccatcctgagcgtggcagaggccnagcctgacatgttgacttcgcatcccaacactggaggcnnagcaggaggaccaggaggtcnagggcagcctctacntagtttctggaaaatgtgagaccctgccttantctnancannangaggaaaagagaaaaagacccccnatgttcatctggtatgtggtctagggaagccatcttgccaagcctgctgtcgccctggctccacccacacacttgcaaggaaaacagaacaaaagtttactttgtatcattaaatattggggccagtgagagcgctcagaaggtagaggtgctttcttccaagcctgacagcctgggtggctccctgagacccacgtggtgaacagagagacccagctgagagacccagctctaactaattgtcctctgatttccacacncncagaaactgataaagaaaatgtcactta

SEQ ID NO: 3754 - DNA, 111 bp, Homo sapiens
  misc_feature (1)...(111): n = A,T,C or G
ggagctaccatgggaaaaaccctggcangcngnggancttcattgaaagatggctacngnccttggcgccctggncttgggctctctgncncatctctctgatacctttga

SEQ ID NO: 3755 - DNA, 163 bp, Homo sapiens
cctgatctctcaatgccaccttcgttaggattcatgaaatgagtccctgtccttcctggtcatgctggcctccgaggcgcgggctgggatctgtcaggctgcgtatttattaagtttggctattctataaagacttgtatatacttccgtggaaaaaaaaaaa

SEQ ID NO: 3756 - DNA, 312 bp, Homo sapiens
  misc_feature (1)...(312): n = A,T,C or G
gactgaggatctgagtgtggctctgttcananaattgcttttccanccnganggaggagaaccggcctcngnccggattcanngaacacngtanactgtgtggtnntttaanntcnggccttggannctagggatggnagagactcgtggccttccctgaggcttgnnccgttcatcaccctggacatgatggatcaacgagagcnnnanggcacccattgagtncnttctngatcnnttnctgggcaggtcctaattgacgacatggatcttatgcatgtcagataaccatgtggattctataaaaaacca

SEQ ID NO: 3757 - DNA, 101 bp, Homo sapiens
  misc_feature (1)...(101): n = A,T,C or G
ttcggaggtgttttggctccctnccttggtctctgggctctccagctnccnggctcttgnccccncaggcagngtctancatggtctcccttttgtagcat

SEQ ID NO: 3758 - DNA, 126 bp, Homo sapiens
gactgagaactctgggcctttgccctaccccagctatggctcccggggctccctcctccagccccagccctatcctggctgccctgctcttctcttctttggtgctgtctccagccctggccattg

SEQ ID NO: 3759 - DNA, 203 bp, Homo sapiens
  misc_feature (1)...(203): n = A,T,C or G
gactgaggatctgtgagacctgggctctcagtaagtctcctgcctcagctatccaagtacctgggactgcagttttaaagtncntgcctnaagtnnnagccctganntcccttattgatggatangccatgaggaagtgtattnccgaaaagaccctttnctccccgggnacaagaagaagntnataggacatcttgagggag

SEQ ID NO: 3760 - DNA, 118 bp, Homo sapiens
  misc_feature (1)...(118): n = A,T,C or G
gactgagaaagggtctcattacattattctgactggctgggactcactgtgnanaccanatctgatanatctccangtgctgnatgaatggngngcgccacttcacatggcatgggcg

SEQ ID NO: 3761 - DNA, 197 bp, Homo sapiens
  misc_feature (1)...(197): n = A,T,C or G
ctatttgtgtaaagaactgnctaaaatactnaccgggggngttcttctcccttataattnacactattnggtgaactgntnacagngggnttaagatactgncgcatttgcttgggtaatttttgtgcaaggngtaactgaagtatgcntattancacacagggccggggtgactcttgnnttcaccacactttggg

SEQ ID NO: 3762 - DNA, 186 bp, Homo sapiens
  misc_feature (1)...(186): n = A,T,C or G
acaagggccagggagaccatntnagtgggaattacctgtgaggacacgtgctgctgnttntagttcactctctgacctctcctgaagaagccaagctgcagagatgagctacaaaggacattctcagagctgtcaaaaagaatcagaggagaaaggcttcaaagaagactgagaccagaccagctg

SEQ ID NO: 3763 - DNA, 364 bp, Homo sapiens
  misc_feature (1)...(364): n = A,T,C or G
taactgtcttctgagaggcttgatccancctctgntggananagatacagnggacacacgcccaaacattaagnggagcttgggagaattncttgcaagagagggatganggactganngagccnnagaggncanggacaccatcaagaanncctacagaattnactatcctggggtnggggggactcacagaaantaattaccaaagagcatgcagnatgaacncngatgnctctgactgttacctgcctttgaactccttttccctattggactggctcgcttagncacaataggagatgtgcctgnncccnctccaacttgatatnccagaganagtacataatattcattcttccatgta

SEQ ID NO: 3764 - DNA, 143 bp, Homo sapiens
  misc_feature (1)...(143): n = A,T,C or G
ctacttctggtgggaccctcttnggtcgggngggaaaaaaccaggacatnacanatcatanaggactgacccagcgttnctccancgcccttttgctgatatttgtnaatnngactgagcnttaaaaaggctctccgtagaat

SEQ ID NO: 3765 - DNA, 299 bp, Homo sapiens
  misc_feature (1)...(299): n = A,T,C or G
tcctgctagctccccttgacacactgggcnnatgggcttacatcnccaacaggatggngtggaggtcaccagccgnggtagtggntggagannanagagaacggatgcttcttncatccacatnctatgcagaactataaaccngacanntacgntttccgcgnaatcnaggaacaantatagnananaccaatntctatagnataattgntatatgaggaaggagaanaaactcaagtgaaagccacagaaaatatcttttaacanaantcatagaatanaaaatttcaaatctaaaa

SEQ ID NO: 3766 - DNA, 156 bp, Homo sapiens
  misc_feature (1)...(156): n = A,T,C or G
ggaattgatatacgaagattctgaagccngnagggatctccagcattatcagcaatctgatatnttntgttccctcggantgntttaactgccatccccagtgagcagagtgntgnggactcggagctcangctttttttttttttttttttttgg

SEQ ID NO: 3767 - DNA, 209 bp, Homo sapiens
  misc_feature (1)...(209): n = A,T,C or G
cgaggaatggaaggagccgctccacaccaacgtgtgagaaacacatacccatattacacaaaagtctgactgacaccaccaccaggctgactcctggcctttgggggtgggngtggtgaagtagctctgaagaccagctgaccttgaacttgtgggagatctntcttcttttgcctgccaattaaaggagtacaacattgcttaaaaaa

SEQ ID NO: 3768 - DNA, 173 bp, Homo sapiens
  misc_feature (1)...(173): n = A,T,C or G
gagcctgggctacacattcttgantggnaacancaccttttacatcanaatctcgctggnagagggaggccctttgnttctcagaagtagtgcaccttacgcttatttttcaacagngaaaangagtcatacagaggttaaatnaaaaataccttttggaaataaaatactag

SEQ ID NO: 3769 - DNA, 368 bp, Homo sapiens
  misc_feature (1)...(368): n = A,T,C or G
gactgagggtggggaagactgggcaattgtcctgtgctgaggaactttttacctgggtgaaactttccggtccgaagagcagagaggaggttaccagcatggagttacctgagtgacagagcctccaggtttgggaaaaccagcccctggcaagtggctgaggtgaagactctcttttgtctccaaatgctaatagttctggattcaaaatctttttttctntttgactggacccggatataataaaacaagaaacttacagcatataattnggcattttactggtatgggaagctcacaaaaattttgttctccctgacaaggctcagctaattctatcaaaataaatctctggaggaaaaaaaaaa

SEQ ID NO: 3770 - DNA, 245 bp, Homo sapiens
  misc_feature (1)...(245): n = A,T,C or G
ggagatacgctcgtctgcagagaatgccaagcttctccttancctgttttgtgtcgcctctcataggtgccaaggtctgaagtttacatatcgatacntgattgagtcctgtgtctttcccttggaanngttgggganagnncttaaagangtgcaagtcanagcctgggtcctggcagcnctaacaaaccaggccaactacccttnttcaacaggtttattaaatatactattaatagtgaaaa

SEQ ID NO: 3771 - DNA, 117 bp, Homo sapiens
  misc_feature (1)...(117): n = A,T,C or G
gctgacttggatgaaggagtncgtctcctccctgcggctgaagaaacattaccaacatggctgactggattccttttgagtgnttnttgnttgcttcaatatttttgagatgtttgc

SEQ ID NO: 3772 - DNA, 109 bp, Homo sapiens
  misc_feature (1)...(109): n = A,T,C or G
gctctacgagggcggacagcngttnantgggatttgaaagatgagacnngccgnganncacgatgcccctgcccgagcgctgaggactctgncgagggaacccctgcca

SEQ ID NO: 3773 - DNA, 276 bp, Homo sapiens
  misc_feature (1)...(276): n = A,T,C or G
gactgagagggggaaggaaggatatcatattgtgagaatcaaagaggggcctatgagatgttcagaangtaaaggcacgtgtnatcaaacctaacaccgtgaatttgatacggggatccagnatggtgaagagagacaggaccccacactggtgccctntgacctccacatgcatgccacagnacatgtgcncctacagccacaggcaatctcggccaactctncatgcaaataataggaataaatctaatttgaaaatgaagtcaaaaaaaaaaa

SEQ ID NO: 3774 - DNA, 104 bp, Homo sapiens
  misc_feature (1)...(104): n = A,T,C or G
ctggactgggcttagccngtggatctccaccttgctaaggctttgacccttaatacagatccttatgttctggagaccccctccccnaaccataaaattattct

SEQ ID NO: 3775 - DNA, 277 bp, Homo sapiens
  misc_feature (1)...(277): n = A,T,C or G
gactgagactgattcttgaattccctggnagagtgctgggatgctgaaagcagaggttgggacctgggtgggaaaagtcttctgtttagagatggatgacggatggagttgcaccaccaggccagtgatgtagtcacttttatctgtgcagactgggcatctccagcttccaatgagcccagtgcttgggagcagtgggtaagctcacctccatagagatgacaactagtgagggttgtgcggggacagagacaataaacaagtaaacacaaaaaaa

SEQ ID NO: 3776 - DNA, 205 bp, Homo sapiens
  misc_feature (1)...(205): n = A,T,C or G
gaaggagctaaagataacttgtctctgggcctgcacagattccacccctccacagtcactgaagttctttattatcattattgttccaaactgatctttaatccattaagtagctaaggatgaccttgaacttgngggcctactgtctccacctcctggnttatgcaacactggggaccaancccagagccacatttgtgctagg

SEQ ID NO: 3777 - DNA, 303 bp, Homo sapiens
aactgaggagagcagcctcagggtgcagcccagcagaggactcggttttctggggttccagtctctgctgcacctccacgcctttccacttgctgtctgagatgacagagagcctggctgctgagaagattgtcatagatccatggaagaaggccatcggtgggcacattctggccgagactcaagtacaaccacatgtctagaaagccagcaaggtcaaatgcaataggagtgcatttggccagacagccttattggagacttgtttgccccaataaaccatgcttagctgaaaaaaaaaaa

SEQ ID NO: 3778 - DNA, 423 bp, Homo sapiens
  misc_feature (1)...(423): n = A,T,C or G
gactgaggttgatcctgccctgatccctgctgagctagatgtgatggaggtccggcttgtcagtctgcgctgnaagtgggtctcccagcattttgtgcacctaggccagtgcctcttggngaaatacaatgtgaactataaatctaagctgcgcatgaagtnttgagtgctctagngaattgtatcacgagatattaaaaagaancaggctgaagtntgngcanacncnncacaggcgatgagtcctttgctttgnatgctnnaactnctntgcattnatttngcccacacaanagtgcagnncanantttncttcntgcannctctntccattgcttgcctggangaaacaacntgaatatgacgcaannaacagcnnttaanaaggntaattatcttattatttttaaggaatgcattttg

SEQ ID NO: 3779 - DNA, 174 bp, Homo sapiens
  misc_feature (1)...(174): n = A,T,C or G
agttgtgtgtccaccttggntgnacnggacctcactttcatagnctaggctggccncgaactcacagnatctccgcccgcngctgacttcctagngntgggattcaaggacgcatgacaccncccttgncatgctctcagatgcctgcggcctcgttntctttctggcttcgca

SEQ ID NO: 3780 - DNA, 138 bp, Homo sapiens
  misc_feature (1)...(138): n = A,T,C or G
ggctggcttagccagcngccagcccntctgaacaagccaggnaagaggcnatgttctctgagatgaggatggagcctaattggtgccantcttagggaacaaatnttaacagaaatatattctcagcaggtccaagct

SEQ ID NO: 3781 - DNA, 119 bp, Homo sapiens
  misc_feature (1)...(119): n = A,T,C or G
aggctgagccttggaagtcctgccttgagttgggatctgccctgcactgagttttcttccctgccgngatatggagaagntgnncaccatgcttactgagcagcatcatcaagaacaga

SEQ ID NO: 3782 - DNA, 150 bp, Homo sapiens
  misc_feature (1)...(150): n = A,T,C or G
taaatcctacttcgtaactcccccaaactccaacccttcattcagcacgaggccaggcagtgaagattccgagcagctcaacgacggtcacaaccggatgaaatgctaatgaaaagccattcaaaaaanttgnttttattttgtgaaaaa

SEQ ID NO: 3783 - DNA, 204 bp, Homo sapiens
  misc_feature (1)...(204): n = A,T,C or G
tagaaactgcatgaagcgtcttgggntnggtccccagcataaacatgagcacaggntctnacatccatgatcccagctgttggaccgnatgagaacccatctgaganatagacaaatcaaagtaccgaagcagagaattccattttgtaatccagctaagtggaaggaggttcaaagggggcaaataactctcaaaaaaaaaaa

SEQ ID NO: 3784 - DNA, 294 bp, Homo sapiens
  misc_feature (1)...(294): n = A,T,C or G
ggggtctgcgtctagagagaggaccttcgcccaggantatcccatgcagaagggnanaagggcacagggncttgcctttccctcagcaacaatccagncacttcatctagccttggatgcacagcataagcattgggggcctgcagtttcacgtctgcccagnaagggtcttttgaaaatgccaagggacactcctgggtgatgacaatgtgctattctcagtgggaagatgacagttcaacaatggggtagatcttgtcctgaataaacatcttcattggttaaaaaaaaaaa

SEQ ID NO: 3785 - DNA, 238 bp, Homo sapiens
  misc_feature (1)...(238): n = A,T,C or G
gcgaaagaaagggagatagcaaattanccagggagcacctgctggagncntggatgtntgccctanagctgggccagnctgggctngaggccctnccttcaacctccnttgctaccntgggccaagnccaactctcctagggacccacagcctctanagccagataacccctgccaggtcggttgggtggcacttgctgntcaaacaggaagaatggcacanacactggggccttaag

SEQ ID NO: 3786 - DNA, 225 bp, Homo sapiens
gactgagtactttggagctatggccttagctatttgagactgatcttgaacttacacagccaaagatgacactgagctttctgcctctggactgcttggaatacaggtgtgtcccaccatgcctgtgttcatgtactgctggcaatcaagtccggggctttgtgactactgagatggcaagcactctatatccctatccccattccctatttaaaacaaaacaaa

SEQ ID NO: 3787 - DNA, 120 bp, Homo sapiens
  misc_feature (1)...(120): n = A,T,C or G
caccttaggcctatgntatagcagcttcntcctatgtaatgcctcataatgacttttgtttagacancanattatttttttaagatatttacacaaataaaagatattttgaaaaaaaaa

SEQ ID NO: 3788 - DNA, 476 bp, Homo sapiens
  misc_feature (1)...(476): n = A,T,C or G
tgaggccttgaacaaagaagaacacaaatcatgtcccgaggacttcctaagcagaagcctatagaaggtgttagagaagtcattgttgtggcctctggaaagggtggtgttggaaagtctaccaccgcagagaaccttgctcttgcgctggcagcaaatgattcgtccaaggcggctggcttgttagatgnggatgtgtattggnccttccattccaaagatgatgaacctgagaggaaatccagaattatcaccaaatgaatttcctctgctcacaaccaaacgagtgttctggaagggtgttttnggaggantngtcctntttcccccccctnccccttncnttcctttttcnccctntcccttcccnccctccctttcccnattccnctttacccnnncnttcncncacaccnntcccnntntncnttnntcnttttcnttccctttccccccctncccccctccttcttttc

SEQ ID NO: 3789 - DNA, 168 bp, Homo sapiens
gactgagaacaatcactggcttgaaattcattgggtaggctaggctggtcagccagtaacccatctgcctgcctcaccggcaccaggatgtcatgagcccatcgggacatttatgtgggttcttgtggttgcaaagcaagcactttgactcatgttcaaaaaaaaaaa

SEQ ID NO: 3790 - DNA, 248 bp, Homo sapiens
  misc_feature (1)...(248): n = A,T,C or G
ttgagggagcccatgagcnngtgctgaggcagcaccgcatncgtnttgacnanacngtgcttnatatcaganngccanacagctttctggngacgggacgangattnttcagcaaggagtggccagaagctgtggctggaggcaagagctaccgtctttgcagcccaatatcccaaacanctgataccagaaccaactagccccttggattctgcanatagcagtgnntaatgggtgttatgggtggt

SEQ ID NO: 3791 - DNA, 394 bp, Homo sapiens
  misc_feature (1)...(394): n = A,T,C or G
gcccaaaggagcacccggngctccaggtagaagacacggatgctgatagtggccccctcatcccanaggagacactccctccacctgagagaccaccaccgtctcctgtcaagtcggacaccctcacagttcccggcgccgctgcagcaggccacaggttacccatgatgacttgcttgcatctctatctgagctgtgcnggctggctagcgggtttgacagatggggcagacaatagagatgggaagtagcaggactcagatctcctctgcctgcgcggctgagaagcagtctcagctgcaagacagagggatgctttgtagcaaatgctattgttcacatatacactaaatgtaacaactagcctctgccccctttttaaatcttgcttcag

SEQ ID NO: 3792 - DNA, 269 bp, Homo sapiens
  misc_feature (1)...(269): n = A,T,C or G
ggcggccatcctactgngccgagcctcgaccattcctgacagacatgcacatttangctcantgctcctcttacaagaaacgnactttcctntcatgtgtgaagggaggcactgcagctctcctgctggaaatgatgtnnaantctnagcnacttggnnagcncagaggacctggctaccaccatgcttcccaccatagatgangacaaactaaacctgctgacncnagtaagccagccccaactanctngctttgttttaaacaaaaa

SEQ ID NO: 3793 - DNA, 148 bp, Homo sapiens
  misc_feature (1)...(148): n = A,T,C or G
gttcagaggtgtaaaaccgnctgagganggggggccngnagncattgaanatgtccacttggctgacanacgccctccaggaatnaactgnggacnaccaactgctccaaaaatgantntgnactctggactggaggaaagctgatgt

SEQ ID NO: 3794 - DNA, 175 bp, Homo sapiens
  misc_feature (1)...(175): n = A,T,C or G
aatggagactgatagaaaagggcagctggctcccacaagatactgtctcgggcaccacannatgagtactttctatatcnncagcaactattacnnagcccggtggagnacccagccctgngttcctantgtncgncatgtgctgcnctattaccttcncctgtacttccatcta

SEQ ID NO: 3795 - DNA, 222 bp, Homo sapiens
  misc_feature (1)...(222): n = A,T,C or G
tggcctcatggaggccccaacgacccanccagagaatcaggagaacctggnggtatgaggccctgangcctcgantccncgngtnaccgtttccgccatttcnanctgggcnatgcagcatgggncacctcgangccctggngctgctcngtgcnctggngccgggactggntncanccaggangtgcacacaaaangagcatgatgctggagctgctgttg

SEQ ID NO: 3796 - DNA, 116 bp, Homo sapiens
  misc_feature (1)...(116): n = A,T,C or G
ccaggagatcccagtctgaggncattgaagctagccgaatgnacnnatnacttngancangttattttgagtcttacnaccgccctacactatnntatttgaaaatacctttgcac

SEQ ID NO: 3797 - DNA, 176 bp, Homo sapiens
  misc_feature (1)...(176): n = A,T,C or G
gcacatggccacattctgatgctctcaagttttggaatttttntgntggttnggnngntactcattnctgntttctgctgncttatagcatntcccacatnaccacagngcactccctaaacgaggntnttattgaccatgtgttanaagagacaagtncttatgcctcacccggg

SEQ ID NO: 3798 - DNA, 287 bp, Homo sapiens
  misc_feature (1)...(287): n = A,T,C or G
caaaagatagaaaacggacnngatgaccatgatagccacattaagcagaacgctcacgtggatgacagactctcacaccccatcatcctcagacgtcggcgtcagtgtgattgtgaagaatgtccgcaacatcgactcctccgagggggtggaaaaagatggccacaatcccacaggcaatggtttgcataacgggttcctcacggcatcctctcttgacagctatgcaaatgaagaagcacccgtgccgccagtgtgacaagtctttcagctcctaaaaaaaaaaa

SEQ ID NO: 3799 - DNA, 385 bp, Homo sapiens
  misc_feature (1)...(385): n = A,T,C or G
gaggattgtgccctgggatgggggattcagtttcttcatttatagttggaagtgggtgaagccacttcngaagcagtttncctctccactctgacaacaggcaagagtgagggtccaacaatacagaggaagtaacgtgtctgctgctactcttccatgcccagtgccaggagcgacggtacactccagagtgctgtgccctgatgggcctttgagtggccagtgcagtggatcatcanccctgtctcccaagagctccagtcccttctccggagaggaagngggtccactggcagntcaggaggccatagcaggattgtcacgtgtgctcaacagccctcctnggctttccanaagaggctggaacagggcccttgaagatgtt

SEQ ID NO: 3800 - DNA, 222 bp, Homo sapiens
  misc_feature (1)...(222): n = A,T,C or G
gactgaggtccctcaaaacacagtagcncttgggcctggagaganggctcagcggttaagaacactgactgctcttccaaaggtcctgagttcaactcccagcaaccacatggtggctcacaaccatctgtaatgagatctgacgccctcttctggtcttcagacacacatgtaagaaactgctgtatacataatgaataaataaatctttaaaaaaaaaaa

SEQ ID NO: 3801 - DNA, 535 bp, Homo sapiens
  misc_feature (1)...(535): n = A,T,C or G
gactgagagatggaagagaccaagacccctcagggaaaggagtggaccttagtgttctgaagcagctatgacccacacagcacttcctgtatgagggctctgagaggcgtggcattgcatcatagncangagactgagactnggaatnnacacgngccctttcctgtgacggcngttgnannagccttacctannnaagggnaaaacgacgctcctggctcgagcgtgctgccacgnnnnagtgccnnnaagcanacacatgagantttancttctgctgnttagaaacccacctgcntaccctgaacaggcngtgagccngcnatggacgccnatgcannttgagctcantaagctgtcggnagctgctgaacttgaaagggggctttgaggctccagncaaggggagctagcacagagaccacgcaaccctcagcggcccagcggctcctgaccatgggtcgangctcgcggagacaccacagccttcccaccgtgccaaggaggctgagggcgaaacctggctgcgttttat

SEQ ID NO: 3802 - DNA, 169 bp, Homo sapiens
  misc_feature (1)...(169): n = A,T,C or G
ttttttttttttttttttttcntntttttcttttttctttcttttttnttttttttttttnttntctttcctcntcctttctttntttnctctttcttttttttntttccggggggnggtnnccccgcttactttcctccantcccgacatatttgattttagtgagat

SEQ ID NO: 3803 - DNA, 195 bp, Homo sapiens
  misc_feature (1)...(195): n = A,T,C or G
ttaagaaagctggatgcaggggagtttcccagctatccttntaaagntgctgnccacaggcngangaanaataccntaagcaggacccggcgctacaatgagtgctaatagntngtataaatcatctgnnagcccnttctacagagcagggnccttttnctctgcttatttaangncttttctaccctcaaaagg

SEQ ID NO: 3804 - DNA, 486 bp, Homo sapiens
  misc_feature (1)...(486): n = A,T,C or G
gtatcccctgccccancctgaacctgcttgctcggggacggagcntcctgctcattctgtcngacacccccactgntngaacctgaggagccacacacgntgcaccttnctactgnaccaggagaatattcngcggnaancggngnccctnccccttncttgataaggtggtgacaaaacaataaaatttgagctntgatcaanannntgnttaaacacataaaccaggaanaaggtntcccatntttctaaaccaacactcctagccaatggtgatcatggaatggaggggaataacactgcagaggacnaaagtgnctntccacactggggctggtgcaccaccaaancagagnnctttcctaancnccgatacactngnaaaagctttgctttcccttcctgggcaccatgtananaaagcngagggtagttctncgngncctctttctgcngatgcctgaacaagccacctgcctcttgtgg

SEQ ID NO: 3805 - DNA, 174 bp, Homo sapiens
  misc_feature (1)...(174): n = A,T,C or G
gactgagatagtgggcaggaaccagcactgcttgtctggatagagccagaagactgccaggatcantcaccagcacaggaaagncaccatagccacacttcagtggggcactctacagaagacagcaggntacttgcanaatgcacagtagtgnccctggacttgcggaggagg

SEQ ID NO: 3806 - DNA, 230 bp, Homo sapiens
gactgagggaggagatgtagtctcccctcccccagcctgaaacctgcttgctcggggtggagcttcctgctcattcgttctgacacccccactgctggaacctgaggagccacacactgtgcacctttctactggaccagagattattcggcgggaatcgggtcccctcccccttccttcataactggtgtcacaacaataaaatttgagccttgatcagaaaaaaaaaa

SEQ ID NO: 3807 - DNA, 217 bp, Homo sapiens
  misc_feature (1)...(217): n = A,T,C or G
gactgagaccaccaggagtccctgtcttcagttactccagaagagggtatcctatcccattacagatgatcgtgagcgaccatgngtttgctgggaattgaactcaggacctctggaagagcagtcagctgctcttaaccacttgagccatgtctccagcccctgaggatatgaatttgactcccagaatccatttttttaaagccaaaaaaaaaaa

SEQ ID NO: 3808 - DNA, 173 bp, Homo sapiens
  misc_feature (1)...(173): n = A,T,C or G
ggaagagcacccgactgctcttccnaaggtccggagttcaaanncnagcaaccacatggtggctcacaaccatccgtaacaaaanctgactccctcttctggagtgtctgaagacagcagacattgtacctatatataataaataaataaataaataaataaataaataaaaa

SEQ ID NO: 3809 - DNA, 510 bp, Homo sapiens
  misc_feature (1)...(510): n = A,T,C or G
gactgagggcagagctataagcaggcagcccccccatggnggnacacacccttattctgggccacgccttctgctggagaccnacatnngggcactanaagaaggaagatncgctcttcttcaccacttgtacttacttgccagcacatctgntagaatctacttcttcagaagactagctgaaacaacatgccctgtgtgggatggaacaactactagatctgggacttgttttgtcccaaactgaccttgaactcagagatctccttgccttagtctcctgggattaaaggcctgtgctgccttgcttggacctangcttttcatagccactatgcttcaagatctgcatgccaagatccaggtcagaaacccgtgtcttccagcctcaagatctggatcacagatgagcccttcaattctggattgtagttcattccagatatagtcaagttgacaaccagaaatagccattacacccgtcttttaatgttcataagatatattatg

SEQ ID NO: 3810 - DNA, 172 bp, Homo sapiens
  misc_feature (1)...(172): n = A,T,C or G
tgagagacagtaaagacaggtccaaaaaaggttcaaagaaagccaacagcagcggtggcggcggttggcggnggcagcgaagncagtgggagcagcaagttgcccccagtttgttatgaaataattaccttgaagactaaaaagaagaagaagatggcttgctgatatattc

SEQ ID NO: 3811 - DNA, 260 bp, Homo sapiens
  misc_feature (1)...(260): n = A,T,C or G
gactgagatgcacatgagtgtgggtactcanagaagaagaactcatctgatcatctggaactggagttgctgggctgnagaganggctcancagttaagagcactgactgttcttccagaagtcttgagttcaattcctagcaaccacatggtggctcacaaccactggtgatgagatctgacgccctcttctagtgtgtctgaaggacgcctccagtgtacttatataagtaaatctttaaaaaacccaaaaaaaaaaa

SEQ ID NO: 3812 - DNA, 158 bp, Homo sapiens
  misc_feature (1)...(158): n = A,T,C or G
gactgagcattagtancgcccannaggggtgcaccgttcctggaagtactgaantagcatccaaccctatcttatctaaaagaaggaggaggaggaagaggaggagaagaagggggcctggcntggaggacttcaatcccancaccaggaggcccagt

SEQ ID NO: 3813 - DNA, 133 bp, Homo sapiens
  misc_feature (1)...(133): n = A,T,C or G
cactgctgatgctttnctcgggcactcaaaaccggaggagncacaggcggncacggccttggtcacattacacactgacngaangnccaccccnggtgttatgngatgnccgtgaccagtgtgacctcaactc

SEQ ID NO: 3814 - DNA, 237 bp, Homo sapiens
  misc_feature (1)...(237): n = A,T,C or G
agactgatagcattgtggccttgttgggagaagttgtgtcactgtgggtgtggacttaagacccttaccccanctgcctggnngtcagtcttccactagcagccttcagatgaagatgtagaactctnagctntgcctgcaccatgcctgcctggatgctgccatgtccaccttgaagataatggactgaacttctgaacctgtaaaccagacccaattaaatattgtctatgaaaa

SEQ ID NO: 3815 - DNA, 140 bp, Homo sapiens
  misc_feature (1)...(140): n = A,T,C or G
gaacctgcttgctcggggcggagcttnctgctcattcgnnctgcnacgcgccactgctgnaacctgaggagccacacacgtgcacctttctactggaccagagattattcggcgggaatcgggtcccctcccccttcctt

SEQ ID NO: 3816 - DNA, 132 bp, Homo sapiens
  misc_feature (1)...(132): n = A,T,C or G
cgcctggggatctgccaananaattcgcaacgggnacagggcactgctgncaacctagatgacccnacangngcacnatttctacncgtaccaaaaaantantccggggggtaatnggcaccccttaccact

SEQ ID NO: 3817 - DNA, 234 bp, Homo sapiens
  misc_feature (1)...(234): n = A,T,C or G
ggtgcctgcaggggaaggtacagntgantgaggccagatttcnngggcacagactttgnaagcctttgaagcaggcttgtccctttcacaccaacctccttttaacccagttaacattcaaagtgcctttgacttcaaccagtcctccccacatctcgnattccctgatcagtgaaggaaaangatgtgtttnattcanaggggggtaaagctntccttgcataaaataaaaaa

SEQ ID NO: 3818 - DNA, 140 bp, Homo sapiens
  misc_feature (1)...(140): n = A,T,C or G
atggtttacatagcactgactgatcttccagangtcttgagttcanttcctagcaaccacatggtggctcacaaccactggtgatgagatctgacgccctcttctagtgtgnctgaaggacgcctccagtgtacttatat

SEQ ID NO: 3819 - DNA, 124 bp, Homo sapiens
  misc_feature (1)...(124): n = A,T,C or G
ctccataggaatacatatgantattntgcctccatntatgtctgtgcactgctagtgcctgangaggccagaanagcgctgtngnatnctctgnaactgcaatnatacataaattgcgatgatg

SEQ ID NO: 3820 - DNA, 139 bp, Homo sapiens
  misc_feature (1)...(139): n = A,T,C or G
ccaccgcaccccgcttntgttagacccatgagcctccgggaactgccgattcacaatgggaacaaccagtgacgagatggtgcccgaggagcaggcctcctngacctcctccctanatccnntgagcttagagggcccg

SEQ ID NO: 3821 - DNA, 230 bp, Homo sapiens
  misc_feature (1)...(230): n = A,T,C or G
gttttgaggatgacccgaggctgctttcaggggcttggatgattctggaagactcactggttcatggcacaggcctggcaatntccagatgagcggactcagcgcacagagagaatatgtgtgagaaacaagatggcaccctaaaccaagacccagaggctggcttgtgattcattcccatgagaataaaacacagacggacccattcccccatgacacttcaaaaaaat

SEQ ID NO: 3822 - DNA, 117 bp, Homo sapiens
  misc_feature (1)...(117): n = A,T,C or G
tgcatacgctttgatccggctacctggcccattngaccaccaagcgaaacatncgnatngangcgagcacgtactcggaatggaagcccggtcttggncnatcaggatgatcttgaa

SEQ ID NO: 3823 - DNA, 145 bp, Homo sapiens
  misc_feature (1)...(145): n = A,T,C or G
ggctcacaaccatctgtaactccagttcccagaggatcaatcantggccttctggcctttgacataaaggacacacacgtcncatagacacgcncaggcaaagggggnatacatatataaaanaatnagtattaaaaaacaaaaa

SEQ ID NO: 3824 - DNA, 145 bp, Homo sapiens
  misc_feature (1)...(145): n = A,T,C or G
gaacatatagaaaaagagaccgagactggagagatggctcattgattaantgcacctgactgctcttccggaggncctgagtttcaatttcccagnagccacatgggttcanactcatcnggcnatggaatccgatgtcctcttc

SEQ ID NO: 3825 - DNA, 222 bp, Homo sapiens
  misc_feature (1)...(222): n = A,T,C or G
ttgagggacgagtatgtagtgctttnctcccccagcactgaaacctgcttgctcgggggggagcttcctgctnattcgttctgncacgcccactgctggaacctgaggagccacacacgtgcacctttctactggaccagagattattcggcgggaatcgggtcccctcccccttccttcataactggngtcgcaacaataaaatttgagccttgatcagag

SEQ ID NO: 3826 - DNA, 492 bp, Homo sapiens
  misc_feature (1)...(492): n = A,T,C or G
tctgcagtacaaacttggcanagaaaatggcnaccccaaatttatagtaaaatgcaccgatacaccngggcctagngcttggnctttctcttttggactggttnggagttcatnatggattattcacgtggnggccggcgcaccatngaanactcctctttggatatgacagctttggcaacgnntgtcggcaagaagaactccccantnngaaggagcccccctntcngggcagggggngactctaaaaaaacacgngtttctttataaangcctgcaatcttgaagncaaaagacaggggncttggtcccacaagccctctgtngtatccagctgtccctgaaaancagctgggaaccctnttgnaaaaaggtccagcttttttgccaacatcaacaggctctttcctggagngtgnatagnttngaattcccttcaactacnctcagagttnaangggcnaaacncactgggntcccaagctcccggtt

SEQ ID NO: 3827 - DNA, 207 bp, Homo sapiens
  misc_feature (1)...(207): n = A,T,C or G
cacgaaagacccaaatctaagacannagcaaanctcccggncngttganatggntcactgggttagagcacccgactgctcttccganggnccagagttcatatcccagcanccacatggtggctcacaaccatccgtaacaagatntgactccctcttctggagggnctgaagacagctacagtgtacttacatataataaataaa

SEQ ID NO: 3828 - DNA, 235 bp, Homo sapiens
  misc_feature (1)...(235): n = A,T,C or G
ttttggacatgacatggntgcacacatcaattcataccaactatctttcctacacaagacctgcacaagatcaagtcaattcaaattncannatggatggaggaagaggatcctaaggcctaccacagctggaggaagtactgcnccatgatggctgctgagggagaaagagtcactttttgntagtgatgaggctgctgncnngctgcccatnaccntgccccccagtgagtgt

SEQ ID NO: 3829 - DNA, 132 bp, Homo sapiens
  misc_feature (1)...(132): n = A,T,C or G
atgcctggcacaccggaagngattaatgggatgntgtatnggactataactgnactgccacagcaaanaattangacngacncnnagtacagtaacacccacaactactcctgaaccttgtaattaaaggaa

SEQ ID NO: 3830 - DNA, 229 bp, Homo sapiens
  misc_feature (1)...(229): n = A,T,C or G
gactgagggaggagatgtantctcccctnccccagccngaaacctgnttgctcggggnggagcttcctgctnattcnntntgccacgcccactgctggaacctgaggagccacacacgtgcacctttctactggaccagagattattcggcgggaatcgggtcccctcccccttccttcataactggngncacaacaataaaatttgagccttgatcagaaaaaaaaaa

SEQ ID NO: 3831 - DNA, 157 bp, Homo sapiens
  misc_feature (1)...(157): n = A,T,C or G
attataaaggggccttttggttgcgcctccncnttctcttcttaactgattgaaggnccnacnnannttaatgcccanatccagcccagtntgtntgtcctnggggagccctgtctatttcaccttcataggatttatcacaactgtaatcaataaa

SEQ ID NO: 3832 - DNA, 173 bp, Homo sapiens
  misc_feature (1)...(173): n = A,T,C or G
gactgagatgtagaaatctcagctacctctccatcaccacgtctacctgcgngccaccttgtttcctgccatgataacaatggactaaaaacctctgaactgtcaatcctagttaaatgctttcttttataagagangctgnggacatggtgnctcttcacagaaataaaact

SEQ ID NO: 3833 - DNA, 504 bp, Homo sapiens
  misc_feature (1)...(504): n = A,T,C or G
ctgaggatcgaggcgtgtgccncactccgagggaantgctnggaccttctgaaggagngaatgaacaagngacnnnnncctganggacaggaangctggcatgtncatgcctttcccatggagntcagntgntgnnatgtgacctgcctcantggctcaacggctcattnanaancctntncgtnacctngctctacattttgctcttganttntcccaagttgacnngagtcacnngtaatcaantntgtactcctggtgaacanatctnatcctaatagtngatgactcacacccncatngcccgcagntaagcggatccttctagaacaccannggtttgctaggcgcagttaatgttttcatagattcattagaccctattatctaaaacaattaaaaacacaaatgctaaacctaaaaatgaatagcttgcgtataactcacgttcaactctgtcaagacataaatgcatagaaagatggaaatgcaaaattttaacag

SEQ ID NO: 3834 - DNA, 225 bp, Homo sapiens
  misc_feature (1)...(225): n = A,T,C or G
ttgaggaacggcactgactactaggcagttcttcatctanaagctgactgggatatggngcacctactatgcccttccangatgctgacaccgagaagacctgggccgttccagtcaaacctacccatgtccagcctcgtctggatcttgggacctagggagagtagagttcttgcaggctccacatcatcccattcaatatgggggctctgcgaggctgttttt

SEQ ID NO: 3835 - DNA, 214 bp, Homo sapiens
  misc_feature (1)...(214): n = A,T,C or G
acacccaaatctaagcanaagcaaacctcccggnctgntgagatggctcagtgnnttagagcacccgactgctcttccgatggnccagagtncananaccagcanccacatggnggntcacaaccatccgnancaanatctgactcnctcttctggagtgtctgaagacagctacagngnacttacatataatacaataaataagtctttataa

SEQ ID NO: 3836 - DNA, 260 bp, Homo sapiens
  misc_feature (1)...(260): n = A,T,C or G
gggtattttggactcattttcccatgtggacgcagcgacatttcctagaagaaanggnccggcntcnatgntnancctgtaccagangtcctgacnngacnncngtgaacttgaactacatctatacatcatggataggcnntccncttgccaaaatatgcaaganngaaagggcctttcctanactaatgattgctgtnaaaaggcccagcttgttgnggtttgnggcactccttaccagatggacctgcctagtataa

SEQ ID NO: 3837 - DNA, 282 bp, Homo sapiens
  misc_feature (1)...(282): n = A,T,C or G
aaaaaatagtactgaagtcnngtaccacacgcattgctcagcaagnnttcagcaaatcttatgctggtggagtagaacaaggttanttaagaccagttatgggctggtgaaatggctcagcagttaanagcgccgactgctcttctaaaggtcctgagttcaaatcccagcaaccacatggtggctcacaaccatccataacaaaaatctgatgccctcttcttggagtgtctgaagacagctatggtgtacacatataataaataaataaataaataagta

SEQ ID NO: 3838 - DNA, 258 bp, Homo sapiens
  misc_feature (1)...(258): n = A,T,C or G
aacattaataaaaaaagtactgaagggngtataggcngnggctntatcctngccagaagccnnnntgatttggtggggaacttctcngttgattggncagtaanccancggcatngctgcanacctgaggagccacacacagtgcacctttctactggnccatnanattattcngcggnaatcagggtcccctcccccttccttcataactggtgtcgcaacaataaaatttgagccttgatcagaaaaaaattaaaa

SEQ ID NO: 3839 - DNA, 158 bp, Homo sapiens
  misc_feature (1)...(158): n = A,T,C or G
cacctgactgctcttccgaaggnncgganttnnnatcccagnaaccanatggtggctcacaancatctgtaacgagatctgactccctcttctggagtgtctgaagacagctacagttgtacttacatataatcantaaataaatctttaaaaaaaaa

SEQ ID NO: 3840 - DNA, 310 bp, Homo sapiens
  misc_feature (1)...(310): n = A,T,C or G
actgaggctattgggatgaagtncaccagnctcagcactacaggagnttgacattgccaggaatgntctanaactgatctatgcacaaactctgacctggcttgnannttatcttctgcccttngctgccttttatccnnatgatcactntcttcattangttctatggacaaaaacggnggcctgatgatganctnngcagcccccaagcnaggnctagnagggcctcncagatgaaaactggnnttgattcttcttgctcttcntcccntcctncacgngaagtgctgngcnccctggctatcaccat

SEQ ID NO: 3841 - DNA, 201 bp, Homo sapiens
  misc_feature (1)...(201): n = A,T,C or G
gactgaggttcttcttgggctggatacaggctcagcgnataagagcactgacttcttccagaggtcctgagttcanttnccannanccacatggaggctcacaaccatntgtaatgggatctgatgccctnttctggngtgtcctgaagacagctacactgtactcatatacataaaatanatnattctaaaaaagaaaaa

SEQ ID NO: 3842 - DNA, 113 bp, Homo sapiens
  misc_feature (1)...(113): n = A,T,C or G
actgaccctctcgaacctgtnagcacacgncccaantacatgttgnntttatgagagtngccttggtcatgatgtctgttcacagcagtaaatnnctaactaagaaaaaaaaa

SEQ ID NO: 3843 - DNA, 127 bp, Homo sapiens
  misc_feature (1)...(127): n = A,T,C or G
gagactgaggtctatggctggtatctgataanncagaaganactgtcagatgccctggaactggaattgcagatcctgtgagccactgtgtgggtgctgggaattgaatgtggaatccatgaaaaat

SEQ ID NO: 3844 - DNA, 198 bp, Homo sapiens
  misc_feature (1)...(198): n = A,T,C or G
ccccagcctgaaacctgntngctcggggtngagctntctgctnattcnttatggangcccactgctgnaacctgaggagccacacacgtgcacctttntactggaccagagattattcggcgggaatcgggtcccctcccccttccttaataactggngtngnaacaataaaatttgagccttgatcacgataaaaat

SEQ ID NO: 3845 - DNA, 226 bp, Homo sapiens
  misc_feature (1)...(226): n = A,T,C or G
actgagggaggagatgtagtctcccctcccccagcctgaaacctgcttgctcggggtggagcttcctgctcattcnttctggcacgcccactgctggaacctgaggagccacacacgtgcacctttctactggaccagagattattcggcgggaatcgggtcccctcccccttccttcataactggtgtcgcaacaataaaatttgagccttgatcagaaaaaaaa

SEQ ID NO: 3846 - DNA, 166 bp, Homo sapiens
  misc_feature (1)...(166): n = A,T,C or G
tcctctcttgcttctgaaaagagagactcntnaanccngtgaggaaataaaccccctctctttttcttaataaatanaaactgaaanagngnagngctganccttgatccagaatacaaaantttttnacaaggnggggggnacagntagatttcttaagactatt

SEQ ID NO: 3847 - DNA, 206 bp, Homo sapiens
  misc_feature (1)...(206): n = A,T,C or G
cactaacacgaggggcnaagggacctnatcttcnatgcattanttntttgatacanaacaaaangcataccagantacacttaaantntggaagtctnctgnttgacaggcaggctaccttatganaaagcngttcantacttnaanttaaccgactcctggcnaaatnaaaatncaaggggaaaagtatttcccatgcctaagag

SEQ ID NO: 3848 - DNA, 135 bp, Homo sapiens
caagactgaggtgtgagctctctgcttgctgctccagtcgctgtgcttgcctgctgtggtgcctccctaccaggacagactcttgtgcttttggaaccataagccaaataaacccttccttccataaaaaaaaaa

SEQ ID NO: 3849 - DNA, 158 bp, Homo sapiens
  misc_feature (1)...(158): n = A,T,C or G
gggagactcaggaaacctggattattgccancagcntnttatcacagtnggnggcactaccatttgngcatgcagtnccttncacattggtctngtgtgcaaaccggagcactaacatnctcacaaacaatgccttacactactatggttcacctatg

SEQ ID NO: 3850 - DNA, 226 bp, Homo sapiens
  misc_feature (1)...(226): n = A,T,C or G
aactgagggaggagatgtagtctcccctcccccagcctgaaacctgcttgctcggggtggagcttcctgctcattcgttctgngcacgcccactgctggaacctgaggagccacacacgtgcacctttctactggaccagagattattcggcgggaatcgggtcccctcccccttccttcataactggtgtcacaacaataaaatttgagccttgatcagaaaaaa

SEQ ID NO: 3851 - DNA, 380 bp, Homo sapiens
  misc_feature (1)...(380): n = A,T,C or G
gactgagggttccaagcactgccctttgggattcaaacgggagccgctttggactgactggctgccttcctcctcctccccctnctcccccttctgcttcagatttatttattatatgtaagtacactgtagcagttgtaggacacactagacgagggcaccagatctcattgtgggtggttgggaaccacccaccatgtggttgctgggatttgaactcaggatntttttaagagcagggggggctctaaaccggtgagccatctctccagcctcctgcattccttcttaaggcatgaatgancccagcataggaagacagtctgccctccctccttttngagccattttccctttcaccatatactcaataaaatcag

SEQ ID NO: 3852 - DNA, 368 bp, Homo sapiens
  misc_feature (1)...(368): n = A,T,C or G
ggatactatcctacgcncaggnaacacacngacctaaacacgaaggaagacccaatcaaagatgctggnntctctcttagaaaggttcantccatcatacagctgactaaaacagatgcagagacccacagccaaacattggatggagtttggtgactctnatggaanaganganaganctgagggccctgaagngnatgggaactccactttnntaccatnggggggncctaacacgnacctttggnnntctcacagactgnaccacccangnaacatacctgngctgnacgtagaacctctgcacatatgtagcacngcncngntctatcttgtgggagncccccaacanctggagcaggggctat

SEQ ID NO: 3853 - DNA, 199 bp, Homo sapiens
  misc_feature (1)...(199): n = A,T,C or G
gtacaacacccaaatctaaaacaaaagcaaacctcccggnctggtgagatggctcagaggnttagagcacccgactgcncttccgatgnnncagagtncacacaccagcanccacatggnggntcacaaccatncgnancaanatntgacnccctcttntggagtgtctcgaagacagctacagtgcacttacatataa

SEQ ID NO: 3854 - DNA, 313 bp, Homo sapiens
  misc_feature (1)...(313): n = A,T,C or G
acaaaagtactgaagntacagcaantgttccacattagctgggtattttggactcattttcccatgtggacgcagcgacatttcctagaagaaaaggaccngcntcnatgntaancctgnaccagangtcctgacnggacggncncatgaacttgacacaacatctananatcatgnanaggccntccccttgcnaaaanangcaagactgtangggcctttcctagactaatgattgctngtgaaaaggcccagctngttgtggntngnggcactccttaccaaanggacctgccttgataagaaagcaaga

SEQ ID NO: 3855 - DNA, 135 bp, Homo sapiens
  misc_feature (1)...(135): n = A,T,C or G
atccatatatgctactgcntcgccntcatgaattcaagctcngnaccnggnnatggaagnttcctatgcggaagtatcctattctctanaaagtataggaacttctcgacctgcaggcatgcaagctgggggggt

SEQ ID NO: 3856 - DNA, 200 bp, Homo sapiens
  misc_feature (1)...(200): n = A,T,C or G
gactgaggttcttcttgngctggatacaggctcagcggataagagcactgacttcttccagaggtcctgagttcaattnccannanccacatggaggctcacaaccatntgtaatgggatctgatgccctnttctggngtgtctgaagacagctacactgtactcatatacataaaatanataattctaaaaaagaaaaa

SEQ ID NO: 3857 - DNA, 127 bp, Homo sapiens
  misc_feature (1)...(127): n = A,T,C or G
gaactgaggtctatggctggtatctgataagatcagaaganantgtcagatgcgctggaactggaattgcagatcctgtgagccactgtgtgggtgctgggaattgaatgtggaatccatgaaaaat

SEQ ID NO: 3858 - DNA, 314 bp, Homo sapiens
  misc_feature (1)...(314): n = A,T,C or G
aatgcttgctttacaagcctgagaagttaagttcaattccagtacccanatgtaaagaacccaggagaattgncatcagctcagctgtggccctgtgtgcaaccatcccatgtcgacaagcaagacagagcccactactgcacaggagcaagactactgnttgtttcacactgcaatgtttttgctttgcaaacagattttcgctcttaagaaaaaaagcatantagtnganttgggtaaaancttgnaatatttttntatcatttcccctcagnacataactatnaaaccagtatattttttttaaaaaaaaa

SEQ ID NO: 3859 - DNA, 305 bp, Homo sapiens
  misc_feature (1)...(305): n = A,T,C or G
ctgacactcgtctgcactggcgacctcaccaagntgananacannntgtgcatggcngccatnntgcntgctnactgaactcccgcacaacangatggaggtaggcgtggccttcatgtgacctattaganncaggacgntntggnntctcccttcaccgggttttagtggnccnattttgcaagtgcagaatggggaggangctccctaaagcancctcgaccatgcacagacaagcntcangtttttcncntactnttnccttatgctttgcaaacggnagactntaaattggtcagcctaaa

SEQ ID NO: 3860 - DNA, 520 bp, Homo sapiens
  misc_feature (1)...(520): n = A,T,C or G
gagaggttccctgatgaattcaaatataaatggagatgtggaaatgggagttgtcaaactgtctacagaaggactttagtttggggctcgtgtactgggcagcacatgaaataacatccctgggtgttgtatctgaagattctgacagaaagaacgggagcagctatagtgattaatcaaagactctcctgataatttgagaagactgcctctcctgagaccagcagatgtngaatgtgagtcagggaagtggagtggagagattcaccaaagcacagaaagttggttgcagggctgctgagatccctccatggtcaaggttcttgctgccaagcctgaggatctaagtttgatccccaggatccaacgtgtgtcaagaagaaaagaactgactcgtgcaagctgtcttctgatctcaacatccgtgtgcacatgagtggtttacacacaaaatacccacatgcaaagaggcatacaggggctaanagagatggctcagcagttaagagcactgactgtt

SEQ ID NO: 3861 - DNA, 298 bp, Homo sapiens
gactgagattttctttgaggtcatgctgatgaaatatggagtcctctttgctaacttcacctgaatcagagaaaagctgcttcactaaagaaacaaaggaaacaagtggccagaggaaccctgcagatgccagctctgtaccttgaatcttctgttttcagcccaacagactaatgactcacatgttaacgaaaatggtctattcatcatagatttttagcagttaaagttatttttatcagtgtgtccaacttaacagattttaagaattattaaacctggaaggccttgtttaaaa

SEQ ID NO: 3862 - DNA, 194 bp, Homo sapiens
  misc_feature (1)...(194): n = A,T,C or G
gagactgagggtgttgtgtgaggtgcctgaggccagagaggctgtcagatctggagctgtacttgcagatggtngtacgccaccgaacacaggngctgngaagaancttcngagtganctcttctgagagagcagctcaaanttttcanntctgtgccattgccccngccccaggagtttatgtttctggtgcc

SEQ ID NO: 3863 - DNA, 154 bp, Homo sapiens
  misc_feature (1)...(154): n = A,T,C or G
tgtgtcctgttgagctctncacaagtagctgtactgaactccagggttcctgctcttggtgatgnagctatatttgagnngaccctgcccctgcccttgcccttttacttatattcttgngaataacctctantaaactcattggattaccaga

SEQ ID NO: 3864 - DNA, 159 bp, Homo sapiens
  misc_feature (1)...(159): n = A,T,C or G
ggatgacttatcaatnatannccacaganccttgcagnanngaccanngaaactgcatnatctccntgacgccacccagcttcagcttcatgcggagcatggntgggggacatgtgctctctcacccttgactggttttttttttgggggggggccacc

SEQ ID NO: 3865 - DNA, 230 bp, Homo sapiens
  misc_feature (1)...(230): n = A,T,C or G
gactgagggaggagatgtagtctcccctncccnagcctgaaacctgcttgctcggggnggagcttcctgctcattcgntctgccacgcccactgctggaacctgaggagccacacacgtgcacctttctactggaccagagattattcggcagggaatcgggtcccctcccccttccttcataactggtgtcgcaacaataaaatttgagccttgatcagaaaaaaaaaa

SEQ ID NO: 3866 - DNA, 202 bp, Homo sapiens
  misc_feature (1)...(202): n = A,T,C or G
ggtagctcagcgtgcctgtgaggnnancanatcctgtgataagcacancagagggatgcatacagaganccannacaactctctctgccagncaatggtatactgctntanctgatgagganancatantatcantcgctggcccntgagatactccactacctgtctnanggagagaatatatntcatgaagctctttgca

SEQ ID NO: 3867 - DNA, 494 bp, Homo sapiens
  misc_feature (1)...(494): n = A,T,C or G
gatagcaatgcatatgggggnncagcgtacctagagaagacactcatcagccctgcagagtganagacancatactaagcagacctaaccacngangtgggaggacccagcanatacctggacctatccacagagatgggaggacccagcagaaacctggacctaaccacagagatgggaggacccaccagaaacctagctgacctctgctcagagcacagagcatggaaganaagganttggaattaaaggttgaaanacagnntaccccncagggcgcagggnggaagaaccatcancancagaccggatcncagtgaccccagangaaaaccntatgcactaagctataccccatgacctaggccctgcactttaagggtttctccgtgtggcgctggctgtcctggaacttgctctgtaggccaggctggcctnnaactncaagagatccacctgcctctgactactgagtgctgggattaagggcggtt

SEQ ID NO: 3868 - DNA, 134 bp, Homo sapiens
  misc_feature (1)...(134): n = A,T,C or G
tgagacaacacagaacacantcagncagagacnacacagcaacgatgctgcagcagacaagacgcgcggcgcggcttcggtcccaaaccgaaagcaaaaattcagacggaggcgggaactgttaaaaaaaaaaa

SEQ ID NO: 3869 - DNA, 223 bp, Homo sapiens
gactgagagatcttaaaaagaagaagagggggctggtgagatggctcagtggttaagagcgtcgactgctcttccgaaggtcccaagttcaaatcccagcaaccacatggtggctcacaaccatccgtaatgaaatctgatgccctcttctggagtgtctgaagacagctacagtgtacttacatataataaataaataattctttttttttaaaaaaaaaaa

SEQ ID NO: 3870 - DNA, 181 bp, Homo sapiens
  misc_feature (1)...(181): n = A,T,C or G
ccctcccccagcctgaaacctgcttgctcggggnggagcttcctgctcattcgttctgccacgcccactgctggaacctgaggagccacacacgtgcacctttctactggaccagagattattcggcgggaatcgngtcccctcccccttccttcataactggtgtcacaacaataaaatt

SEQ ID NO: 3871 - DNA, 229 bp, Homo sapiens
  misc_feature (1)...(229): n = A,T,C or G
gactgagggaggagatgtagtntcccctccccnagcctgaaacctgcttgctnggggnggagcttnctgctcattcgttntaccacgcccactgctggaacctgangagccacacacntgcacctttctactggaccagagattattcggcgggaatcgggtcccctcccccttccttcataactagtgtcgcaacaataaaatttgagccttgatcagaaaaaaaaaa

SEQ ID NO: 3872 - DNA, 116 bp, Homo sapiens
  misc_feature (1)...(116): n = A,T,C or G
ctagttatacctggacagaaacagaacatttnctgttctactatctcaaaaccagaaagaatcttctgtgtttgttaaagaaagtttgcagaggaatataaaggaaaaaaagaaaa

SEQ ID NO: 3873 - DNA, 125 bp, Homo sapiens
  misc_feature (1)...(125): n = A,T,C or G
tctgtaggccacatgagactatctgtattcattccttattntcaaaatgatacctatattcctacatcatctcaactganatacgggatngaaaaatanactcngcaatggatatggttaggacg

SEQ ID NO: 3874 - DNA, 167 bp, Homo sapiens
  misc_feature (1)...(167): n = A,T,C or G
actgagttgcagacgttccagtttcacccccctgtgccagtccccaggacctgagcagcggactcgccatagcccatgtgctgaatatttnaaaagaataaagactttanatctctcatgaatgtactctagacacaatgacgaagaataaaaactgcactggggac

SEQ ID NO: 3875 - DNA, 187 bp, Homo sapiens
agactgagcttggctgagaggaataaaactgagcaggaggtggtggagggaatggatatctctactcgctccaaagatcctgtctctacagagaaaacggccccgaaacggaagttccccagccctccacattcctccaatggccattcgccccaagactcatccacgagccccattaaaaaaaaaa

SEQ ID NO: 3876 - DNA, 199 bp, Homo sapiens
  misc_feature (1)...(199): n = A,T,C or G
actgagggtttctctgtgtatccctccctangngtcctggaactcattctgcagaccaggctgaccttaaactcacagatccatttgcctctgactcccaagtgctgggattaatcgtgtggaccaccatgaccagcaaattattttttcttatgtgaagtggaaaaaatgnattagattaaacctttaaaaaaaaaaa

SEQ ID NO: 3877 - DNA, 110 bp, Homo sapiens
  misc_feature (1)...(110): n = A,T,C or G
ggtcctgacttgcacttcccaggtatcacntggtgcctttggaatccgangcacactttttggtgtgngttggangacngctgctgctgnactcatataaataaaaaata

SEQ ID NO: 3878 - DNA, 217 bp, Homo sapiens
  misc_feature (1)...(217): n = A,T,C or G
tccccatcagagatgcctccaacgaacgtnccagcagagaccgatctgtcttctttcaccctcggctctgacttctccgttgcgatttggacatttgatttatgtctctgtttatgaagccaactgcttagctgctggaagcaacagcgataggcatttgatcaaatacagctgcggatcccaatcttcctctcccatcccggattaaaatcccatc

SEQ ID NO: 3879 - DNA, 158 bp, Homo sapiens
  misc_feature (1)...(158): n = A,T,C or G
ttgcagaggaccggagcttggttcctggcacccntgtccggtggctcacagctacctttatctccagttccagatccaggggatctgatacctctggccttcttggacacatatacataatttcaatagtgangangaantaatagaagaattaaaaa

SEQ ID NO: 3880 - DNA, 114 bp, Homo sapiens
  misc_feature (1)...(114): n = A,T,C or G
actgaggcatatttggnggacaagggcttttaanatgtgtgaaaattctagagagtntctgtagantgtgacgacccacgctggattctcaacatgacccaaataaaacagcca

SEQ ID NO: 3881 - DNA, 414 bp, Homo sapiens
  misc_feature (1)...(414): n = A,T,C or G
actgaggtgtgacttatgangnnctgtcagcattaggagacagtgatgacaaaatccaacttcctattaaaaancatgttgccntattgngaaatggcagngagcaagttcaagtcgcacaggtttgccgactgcaccatgttgttgctgtcacagctagaagctggacatcaggagactgtttgctgcagttaacaagtgtcctgatagactgctcacagccgagtcaacaattctgtataccacgtttgatgaaanactggcaaaacacatgagtgatggtagcatgaaccagcttccttgtttccttggagagcctgccatggaaaagcccatgtatccccagnctngcgcnntntggctatgaacatcatttggnggggggctnaggaggcccgccctgcttgggcctgt

SEQ ID NO: 3882 - DNA, 188 bp, Homo sapiens
  misc_feature (1)...(188): n = A,T,C or G
acaatatacttttggctgattgccncagagaccctgaaggatggcagnatnttactgggataaggcanactactactctcnaggaggagcnctncgcngtacaccctattggatnctnnagagggagcatgcatgacnatncccgaggnaaaaagctgtcttttttnaattttccaacatggtctttt

SEQ ID NO: 3883 - DNA, 280 bp, Homo sapiens
  misc_feature (1)...(280): n = A,T,C or G
tcagcactcacaggcactnagggtcgaatcttagcactcacntggcntcaagtcccagggaatccaacaccctgggtaaatatcaacagactaacaaggacaaaaacaaacacaaacaacaacagcagcagcagcaaaactttcctgggaaggcaagccagccaacttggagaagaaaaagggcaaatatagaaagaaatgattgacaagatgtgggactagaggactctcttgcacaactgttgttcaagactggttaagtaaaacagaaaaataaaaa

SEQ ID NO: 3884 - DNA, 230 bp, Homo sapiens
  misc_feature (1)...(230): n = A,T,C or G
actgagggaggagatgtagtctcccctcccctagcctgaaacctgcttgctcggggtggagcttcctgctcattcgttctgccacgcccactgctggaacctgaggagccacacactgtgcacctttctactggaccagagattattcggcgggaatcgggtcccctcccccttccttcataacttggngtnncaacaataaaatttgagccttgatcagaaaaaaaaaa

SEQ ID NO: 3885 - DNA, 183 bp, Homo sapiens
  misc_feature (1)...(183): n = A,T,C or G
tttttttttttaaaccccttgggcccggncccccttaaaacctttncccaaannccctttgggtttnnccctttncccnanggggggnnaaaccccccaaaaaacctttttttgggntaaaaanggacccttttgggnaaaaagggnaaaaaaaaaggggggggggccccccaaaaaaggggg

SEQ ID NO: 3886 - DNA, 202 bp, Homo sapiens
  misc_feature (1)...(202): n = A,T,C or G
actgaggggctggagagatggtgcagcagttnagnagcactgccttcagaaggttctgagttcaaatcccagcaaccacanggtggctcacagccatccgtaatgagatctgacgtcctcttctgctgtgtatgaagacagctacagtgtacttagatataataataaataaatnacttttaaaaaaacttaaaaaaaaaaa

SEQ ID NO: 3887 - DNA, 218 bp, Homo sapiens
  misc_feature (1)...(218): n = A,T,C or G
agaaagaggcctgatctgaccttctgnatgaccatgttaattnatggccnggaggaacttatgtcagcgtacanatgcccaaatgcctaccgaggattgtggctgntgatttaaagaggcaanaatgactttccatangccgtanggnaagctgggaatcatantccttcnnttgganatgatcagatacgtcnntattnanagtgttaaaaagtgtc

SEQ ID NO: 3888 - DNA, 303 bp, Homo sapiens
  misc_feature (1)...(303): n = A,T,C or G
actgaggaggcttgagnagtgggggcagcaagtagaagagaagaggcaagtagaggaggagagaggacagangaggaggaagcctccatggacctgaaccacatggccaggaganacagtnctgttcaccaagagaccgtcaccacatgcctgcttgcctaagnggcncaggccatgagcttggcaaatgtccancnngcctgagtnatntntatacaacanatgaaccaggngtntcntgttggaaaaaggaatagttgggcagtcacagctttattanacagagaccatccatttgcccaa

SEQ ID NO: 3889 - DNA, 278 bp, Homo sapiens
  misc_feature (1)...(278): n = A,T,C or G
gagaatcagccagcaactgaaaaatataggatgtggatgcnttggagccaaccatcanactgagctcagggaccctggtgggggagctggcagaaggactgaaggagctgagggggatagcaaccccataggaagaataacatcagctggacagaccacccagtgcttncagggactagaccaccaccaaggagtgtacagggagggatccntgactccagattnataggnagcanacaggggccttatntgacatcagnaggaagggagacccttgg

SEQ ID NO: 3890 - DNA, 440 bp, Homo sapiens
  misc_feature (1)...(440): n = A,T,C or G
tcccggatctgtctgagatgncncnntggnntatgagcancccnactgntcttgcgncgntncanagtncaaagcaccagcanccacatggtggcttcacacccatncgtnncaagatctgactccctcttctggagtgnntgaagacagctncagtgtactttacatatactaaataaatnagtctttngnaaanaaaaggcaaatcgcagaagcangtngtttgagggaaaagantcagnctgnntgccagagaaaagatgtggcttttgcagctttggtcctagctcaagccccagcttcagcctttgccagntacttaaccnnctgnagaggttcatttttccttacncggaaatgaagaaactagcttgagccggngttgaaagncaaaggattntgccatgccanaccgaagtgcnttaaaacaatactttggc

SEQ ID NO: 3891 - DNA, 240 bp, Homo sapiens
  misc_feature (1)...(240): n = A,T,C or G
ggtagtctgatctcgaggagggcaacacngaaatggccactgcttctnatctggtgctcttncagcctaggatttcaatcctttttctatccacttncactgattagaccagaaggacagnaacagacacctnctgtccccattcactgataaaacacaagatgctagggacactcaccatnttcnnaccttgagcaagaatggccccttaactgaatgacaagaataacttgggctttg

SEQ ID NO: 3892 - DNA, 222 bp, Homo sapiens
  misc_feature (1)...(222): n = A,T,C or G
atccatgaagccaagaggatggacacaccncaccancngtngttgangaanggacnnnacacccatgacacaactantttactggatccaagctgccaactgcnncaactgatgcnccagctatncantncacaangtgggagatgcgaactaaaggggaccanggagatggaaaagcaaccgagggtgggggctgcccgggggggggggggaaacttaatg

SEQ ID NO: 3893 - DNA, 153 bp, Homo sapiens
  misc_feature (1)...(153): n = A,T,C or G
ctgcagtcctttccggcngacanctgaccttgntgggngttnnccatagcaggctagcactatgtnantgctcctatcganaacttgangactccagatgagaganactcttgatgaccaggacagggggngacactcccccccaccctcccc

SEQ ID NO: 3894 - DNA, 199 bp, Homo sapiens
  misc_feature (1)...(199): n = A,T,C or G
agtctgaggtacttaagcagctanngttgatgaggacancagctagcctgctgcctgggagatctcaaaacntcgcgacggggancagagnntgtgtcctnnagagctctncacaagtngtgtctagaactccagggtntcctgctcttggtagangtangctatatnnagaggtgaccctgcccctgcccttgccctt

SEQ ID NO: 3895 - DNA, 228 bp, Homo sapiens
  misc_feature (1)...(228): n = A,T,C or G
gactgagggaggagatgtagtctcccctcccccagcctgaacctgcttgctcggggtggagcttcctgctcattcgttctgccacgcccactgctggaacctgaggagccacacacgtgcacctttctactggaccagagattattcggcgggaatcgggtcccctcccccttccttcataactngtgtcgcaacaataaaatttgagccttgatcagaaaaaaaaaa

SEQ ID NO: 3896 - DNA, 182 bp, Homo sapiens
gagactgaggtccggcttcctcttctggcagaggccagcggcgcgctgagcgggaaggggccgggacgcggctggagccctcgggatgtctacctctgctgctccttcccctctccgggagctcgcgtttcccggggtgtgtgagcattctcaataaaaagggaaaagcaccaaaaaaaaaa

SEQ ID NO: 3897 - DNA, 176 bp, Homo sapiens
  misc_feature (1)...(176): n = A,T,C or G
gagatgtagtctgcctaccccntcctgagncctgcttgntcgggngggngctttctgctnattcgntctagcacagcccactgctggaacctgangagccacacacgtgcacctttctactggaccagagattattcggcgggaatcgggtcccctcccccttccttcataactag

SEQ ID NO: 3898 - DNA, 126 bp, Homo sapiens
  misc_feature (1)...(126): n = A,T,C or G
tcgccagaggtcctganttcaantcccagcaaccacatggtggctnacatccatctgtaatagggatncgangtcctnttctggtgtttctgaaaacagctacntgtgnactcatataaaataaaa

SEQ ID NO: 3899 - DNA, 229 bp, Homo sapiens
gactgagggaggagatgtagtctcccctcccccagcctgaaacctgcttgctcggggtggagcttcctgctcattcgttctgccacgcccactgctggaacctgaggagccacacacgtgcacctttctactggaccagagattattcggcgggaatcgggtcccctcccccttccttcataactggtgtcgcaacaataaaatttgagccttgatcagaaaaaaaaaa

SEQ ID NO: 3900 - DNA, 103 bp, Homo sapiens
gactgagatggaaaggggaacccttgtccactgagcacctactcgatggatgcactgaagaccttcacacgcatcggtcaccccctccttacactgtcttctg

SEQ ID NO: 3901 - DNA, 289 bp, Homo sapiens
  misc_feature (1)...(289): n = A,T,C or G
acttccatgtgcatgntattagaggnatcgtgtcaccgntngaccggntcataagatgagntngattnanaagagagatacnacgattnttagctatgntgatngcaccnggcgcntntgtggacngctntaancgtctttacagtcaggttttcgacccagtgaagaggctcctcatctctaggcaacagcactgttcctgcatctgttgtcatggcacacaccatggcatcactcccctttcacatgcttcccatcctcatgtactgaataaaagagtcttcccctg

SEQ ID NO: 3902 - DNA, 257 bp, Homo sapiens
  misc_feature (1)...(257): n = A,T,C or G
gactgaggtggtgctgntgantctgatatacagcctgcatgncacttntatcatggagtcaccggtctcagtgaatgagtcaaatagactactcagcctgctctaaagaggngtagntggngctgggcagnggtggcacacacctttaatcccancacttgggaggcanaancaggcangatttctgagttcgaggccagcctggtctcnaggacagccagggctgnacaganaaaccctgtctcataaaaaaaaaa

SEQ ID NO: 3903 - DNA, 116 bp, Homo sapiens
  misc_feature (1)...(116): n = A,T,C or G
gttccatgttcggtggccccagaanagacggngtgtaggcctcagccaccccaggtccggngtncgttctccctggacaccatcctcagtgtnntacnttctgggccagaggccac

SEQ ID NO: 3904 - DNA, 229 bp, Homo sapiens
  misc_feature (1)...(229): n = A,T,C or G
gggctgagcacaggcagagcagaacacgtctgggagaatccagagnggacaggaccatgactgaccaactaggtgcctggaagncagtcttctcctatttgtcttcggaacaagatgtagagctnccagctcctcctgtgccatacctgcctggatgctgccatgctcncccctcgatgataatgaactgaacctctgaacctgtaagctaatcccaataaaaagttgt

SEQ ID NO: 3905 - DNA, 227 bp, Homo sapiens
  misc_feature (1)...(227): n = A,T,C or G
gactgagggaggagatgtantctcccctacccnagcctganncctgnttgntcggngnggngcttcctgntcattcnctntgccacgcccactgctggaacctgangagccacncactgnncacctttctactggaccaggagantattcggcgggaatcgggtcccctcccccttccttcatagcgtggtngtcacaacaatanaatttgagccttgatccgaaaa

SEQ ID NO: 3906 - DNA, 154 bp, Homo sapiens
  misc_feature (1)...(154): n = A,T,C or G
ttgctgtccctccggaagcctgtgcnctcgaggaggccaccccccgccggctgctgctcataagataccatgncttgaacattntggacngattctctgggcttgtctgntttanctngtggctccatatttaccngtttgataagtggcaagc

SEQ ID NO: 3907 - DNA, 112 bp, Homo sapiens
  misc_feature (1)...(112): n = A,T,C or G
gagagccaccatgtggntgctgggatttgaactcaggacctttggaagagcagtcagtgctcttacctgctgagccatctcaccagccccctgttttcgaaatttttttttt

SEQ ID NO: 3908 - DNA, 318 bp, Homo sapiens
  misc_feature (1)...(318): n = A,T,C or G
tttgagacaagtccagctnnccttaaactatngggctgaggatgaccttgtacttgtgatcctcntgcttctgtctctcaagggttgaaattacngncctggagagangattcagcagttaggaagagtaggctgcttcccagggactggggatttgcattctcancatctatacagtagttcatggctgtatgnaactccatctggtttccggggatcaaagtacacatgtggtacacatatgcacagacagttatccatatgcatatttcttccaactcctttaaaattgtttaaaaacagtccgataccaccatg

SEQ ID NO: 3909 - DNA, 199 bp, Homo sapiens
  misc_feature (1)...(199): n = A,T,C or G
gactgagggaggagatgnagtctcccctcccccngcctgaancctgcttgctcggngtggagcttactgcnnantcgttctgtcacgcccactgctggaacctgannagccanacactgngcacctttctactggaccagagattattcgggggaaatggggtccccgtcccccttctcttcataacctggtgtcacaa

SEQ ID NO: 3910 - DNA, 152 bp, Homo sapiens
  misc_feature (1)...(152): n = A,T,C or G
tttctgagctctctgcaagaagccaccacctgctgagcagcctgcgcttgccttcctgacagatcttgacaaagcaaagagatcctggcaaagtggagaaatgggtccccccccccttaaattcanaccctacaattaaagattgagccttg

SEQ ID NO: 3911 - DNA, 294 bp, Homo sapiens
  misc_feature (1)...(294): n = A,T,C or G
ctgagacttgcagaacccntaggaggcgacncccccctngnaccggngtanacagagagtttcnnagccgccacatgaatgctgggaaccgaacccaggtcctctggaagcgcagcaaaggctaaccactgagccatctcttnagtctctcagaagaactacttgntctctatcttctctttcttcatgggagatctttcctgttttatgtataaatagagatctatagagaaaatacgctttgttaaatctgagaatgcaattaaaacatctgaaatacctcaaaaaaaaaaa

SEQ ID NO: 3912 - DNA, 150 bp, Homo sapiens
  misc_feature (1)...(150): n = A,T,C or G
ccacagcgccactgctgnaacctgaggagccacacacagtgcacctttctactggaccagagattattcggcgggaatcgggtcccctcccccttccttcataactggngtcgcaacaataaaatttgagccttgatcagaaaaaaaaaa

SEQ ID NO: 3913 - DNA, 142 bp, Homo sapiens
  misc_feature (1)...(142): n = A,T,C or G
accttgcacatatgtttgcgcctcttcttcaggattacagcttatacagangaccagctganacactccagactgcagactnacagcgacacatggaggcctacctcttcaggntngtagttnatacacgagggccatgcgt

SEQ ID NO: 3914 - DNA, 105 bp, Homo sapiens
  misc_feature (1)...(105): n = A,T,C or G
tatttgagaggccgatgcnggaggatgtccagantccnggctggactatacaagannctnccaaactgaacanagtcaattcaaccaactaataagcaaccctct

SEQ ID NO: 3915 - DNA, 429 bp, Homo sapiens
  misc_feature (1)...(429): n = A,T,C or G
tgaatgcaagggcctnaccatangnccagactgaatcggatgaanagaaaatgaagactagtctagagctcatgggcactggaaaagactctctgaacagaacaccaatagcaggctataaccatgacaaaaaataggacctcatgaaactgagaagcntcctgtttggcaaggacactgtcattcggagaaaggggcagcctgaagaactgtaacagatttttaccaatcacacatctattatagggttaatatccatatcagaactaaagttctcaaaagtttaaacacaaacttgagaaacacttaaaggaatagataggatccttagtcaacagggaaatgcaaattaaaactactttgagatttcatcttacacctgtcagaatggcaaagatcaataaaacgactgacagttaaaaaaaaaaa

SEQ ID NO: 3916 - DNA, 225 bp, Homo sapiens
  misc_feature (1)...(225): n = A,T,C or G
gactgagggaggagatgtagtctcccctnccccagcctgaaacctgcttgctcggngnggagcttcctgctcattcgttctgccacgcccactgctggaacctgaggagccacacactgngcacctttctactggaccagagattattcggctgggaatctgggncccctcccccttccttcataactnggngtcacaacaataaaatttgagccttgatcagaa

SEQ ID NO: 3917 - DNA, 119 bp, Homo sapiens
  misc_feature (1)...(119): n = A,T,C or G
ctgtcggttggcatgcacaggatngancaaagtgngttgcatcctgctttgtcgangcgagcgancagctnctcttnangnttcttcnactccttcangcaccagattgtttctgatga

SEQ ID NO: 3918 - DNA, 260 bp, Homo sapiens
  misc_feature (1)...(260): n = A,T,C or G
ctgagattctcacaaacacaaagttaaacacaaagtancgagtaacaccggcataaggagcacaagaaggataaggataaggaccgggaaaagtctaagcatagcaacagtgaacataaagattctgaaaagaaacacaaagagaaagagaaaaccaaacacaaagatggcagcttcagaaaaacataaagacaaacataaagacagagacaaggaaagacgaaaggaggaaaagattagagctgctggggatgcaaaaa

SEQ ID NO: 3919 - DNA, 300 bp, Homo sapiens
  misc_feature (1)...(300): n = A,T,C or G
ggttaggacatcaaggcatgtctgagcctgcagcccangttggcncaggactcnngagctctngaaganntgganaagaccgcccaagtgngnngaggaancagnanngtgtcctgcctggttgcatacctgccccctggatggacnngcctnggataaccctacacctttcagnnngttcangcccaaaccacgtcccngnanagtttntgcnccgctccanttgcacnaatttgcctgtggattttgtcaggtctggtttgttaacgttggaagcaatattattatggtggcaattta

SEQ ID NO: 3920 - DNA, 445 bp, Homo sapiens
  misc_feature (1)...(445): n = A,T,C or G
gactgaggatcaccactcctttccctgcttcttgtctgctgaggnaagaagaacctcttctggcatctgctccttccagtatgatgctctgcccaagaatgtggagacaggactgaaaccgtgagccaaaagaaatctttcttcctatagcatgcgttacaacaggcattttgncccagggaagagaaaagttatgagtacagatttgaaaaaagaggattnaataacattccgtttctagtcaacaaaattctatacaagaaaacaagtacttgtaaaatgtgatggagactttattgtaaattctaattctatatttaagcaaatattattaatattttagctttgaatggaagaaaagtaaaatattgacttttggacatttaatgattcagaacaataaacatttttgacctaaaaataaatgaaagcaagagaaaaaaaa

SEQ ID NO: 3921 - DNA, 322 bp, Homo sapiens
  misc_feature (1)...(322): n = A,T,C or G
aaagcctgttcagaggactccacagnaaccgcatcactggccccgggatggcgcccatctaaaccgtnccagccctttataaataggttgtcctggaagctgcagctgcgtttctcttcagcaaaggcactggctaagtacaatgtaaacaaatgtttacattctagcatatgctattgggttttgctctctttctgggcaacaattctgagacacttgttcttcgttatcanaacaataactgcccatctgaacagctacaacaggctcctgtgccaatatttgatgaataaattatgctgaatcactttaaaaaaaaaaa

SEQ ID NO: 3922 - DNA, 267 bp, Homo sapiens
tgaggttgcctctctgttattcgacgcgttctcacgaccggccaggaagaacacaacaaccagaatcttctacggcaaagctttattgcttatatctttatcgggccagagtgtaagaagcaagagagggaagcaagagagcgagaaaaacgaaaccccttctattttaaagagaacaaccattgcctagggcgcatcactccctgattggctgcagcccatggccgagctgacgttcacgggaaaaacagagtacaagtagtcgta

SEQ ID NO: 3923 - DNA, 141 bp, Homo sapiens
  misc_feature (1)...(141): n = A,T,C or G
gcttgccaactgcacccntctcattanaagctacgttgacngccngacacacaaccaacttccataaagctgacttctacttctgtacctatgcatactatgggcatgtgtgccttcctccccaaaggaaagaaaaagaaa

SEQ ID NO: 3924 - DNA, 188 bp, Homo sapiens
  misc_feature (1)...(188): n = A,T,C or G
aggtctcatgatgttcannacgaggcttgaacaagatncttaatcaagccgggcggnggtggcacacacctttaatcccagctatgttgnnanacagaggcaggcggatttctgagttcaaggccagcctggnctacagagtgagtnccagcacagcaagggcaaatcctgactcggaaaaaaaaaaa

SEQ ID NO: 3925 - DNA, 350 bp, Homo sapiens
  misc_feature (1)...(350): n = A,T,C or G
cccagctggagaccantantgcaagcacaggaccctattggggggcattctacattcaaatcctaccagctggagaagggagcggngccctgactgctgaggaacctcaaggggagaccatggagtaagaccactgcagagcaaggtggggctacctgagcctaacccaaccttctcaagccctgctcaggcaacaccttcatggtctggtgtcagcanggacacagaaagaagtgacttgccattctggttaagcctgccctgcaccatgaatgttttttataaaaaggctgttggcttccttgctgcctgtgaacctgctatgcagtctgtggaataaaacaatcctg

SEQ ID NO: 3926 - DNA, 191 bp, Homo sapiens
  misc_feature (1)...(191): n = A,T,C or G
gaaacctgcttgctcggggnggagctngctgctcattcntnctgccacgcccactgntggaacctgcggagccacacccgtgcaccnttctactggaccagagattattcggngggaatcagggncccntcccccttccttcataactggngacgcaacaataaaatttgagctttgatcagtagattaaa

SEQ ID NO: 3927 - DNA, 218 bp, Homo sapiens
  misc_feature (1)...(218): n = A,T,C or G
gactgagggaggagatgtagtctcccctnccccagcctgaacctgcttgctcggngnggancttcctgctnattcgttctgacacgcgccantgctgnaacctgaggagccacacncgngcacctntctactggaccagagatnatncggngggaatcgggtcccctcccccttccttcataactggtgtcgcaacaataaaatttgagccttgatca

SEQ ID NO: 3928 - DNA, 189 bp, Homo sapiens
  misc_feature (1)...(189): n = A,T,C or G
gactgaggtgacctttggagactcgtccaactcctctcagacatcagagtcgccgcaagtcttanccagcacatctgcctgcaaagcctgggttctccttgcagtgtcctataggttatcctttaaattcctcaaaatagacctaatgatattcattggagtgctttttaaataacaaaagaataaaaa

SEQ ID NO: 3929 - DNA, 204 bp, Homo sapiens
  misc_feature (1)...(204): n = A,T,C or G
gactgagaacaattccagcattggaacgcaccgtggtgcaaatgangaagancaaggtgantggaattgcaggtgctctgtctccacagctgagttcacatgaacaaacaggcatgttccactgntactgctctgctccttaaaccagatnattttgaaatcattnntaactatcacaatntntacgtttcaaaaatcaatgca

SEQ ID NO: 3930 - DNA, 223 bp, Homo sapiens
  misc_feature (1)...(223): n = A,T,C or G
gactgagacagggttnctcaggctggatagaggctcagcggtnaagancactgactgctcttncagaggncctgagttcaattcccagcaaccacatggtggctcacaaccatctgnaatgggatccgatgcactcttctggggtgtgnctgaagacagctacagtgtattcatataaatgaaaataaataaatctttttttttaaatccttaaaaaaaaaaa

SEQ ID NO: 3931 - DNA, 271 bp, Homo sapiens
aactgagggtttctctgtatagccctggctgtcctggaactcactttgtagaccaggctggcctcgagctcagaagtccgcctgcctctgcctcccaagtgctgggattaaaggcatgcgcaccaccgcccggtcctcagttcaaatcccagcaaccacatggtggctcacaaccatctgtaatgagatctgatgccttcctctggagtgtctgaagacagctacagtgtacttacatataataaataaatattttttaaaaatgaaaaaa

SEQ ID NO: 3932 - DNA, 428 bp, Homo sapiens
  misc_feature (1)...(428): n = A,T,C or G
ggggaccctgatcatccagagtgctttnntagtctcancacncctgcanaaacaaagatggagacaaggactctgcngnnagagcctgtgaatggggaggtantggnatgctgccctcaagccctctcttacaantgnagacgagnactccaccannnaggncctngaanaanacttaaaggncccaccttttanttccagngganaacctgttaatnctgttncactantaccagagncttcaaangtgcccaaggccacattagctaaggtattggcctcanttttcacaaaagaattngcctgttggagccacttacgtaagagggtaganaatntagaatctttaccctaccatgtcatcctttannaacataggtatttcagacatacntttttatatttncctttcaaggcttcattcaatt

SEQ ID NO: 3933 - DNA, 240 bp, Homo sapiens
gactgagaacttattttattgatggttcatcaaaggatataagatggtttcgtgggcctggagagatggctcagcaagtaagaacactgactgctcttccagaggtcctgagctcaaatcccagcagccacatgttggctcacaaccgtctgcaatgagatctgatgccctcttctggtgtgtctgaagacagctacagtgtactcaaatacataaaataaatctttaaaaaaaccaaaa

SEQ ID NO: 3934 - DNA, 231 bp, Homo sapiens
gactgagtctcccctcccccagcctgaacctgcttactcaggggtggagcttgccgctcaatcgttctgccacgcccactgctggagcttgccgctttgctgtttcgaagccatcacgtgttcacctgcaaccttactcctagattatttggcagggaatcggcccctcccccttccttcataacggagtgctggaatagtaaaaattgaaccttgagcagaaaaaaaaaa

SEQ ID NO: 3935 - DNA, 235 bp, Homo sapiens
gaagaggatgcagcatacgaccagacacttggtatagaaatgattccgggctggtgagatggctcagtgggtaagagcacccgactgctcttccgaaggtctggagttcaaatcccagcaaccacatggtggctcacaaccatccgtaacgagatttggcaccctcttctggagtgtctgaagacagctacagtgtacttacatataataaataaataaatcttaaaaaaaaaaa

SEQ ID NO: 3936 - DNA, 119 bp, Homo sapiens
  misc_feature (1)...(119): n = A,T,C or G
aggatttatgacttctanaatgactactatcntcttgancatggaaccnnggagcnaanngcgaccaggcttgactcanngggagacctgagcagcngagggaagcagaccttgctctg

SEQ ID NO: 3937 - DNA, 146 bp, Homo sapiens
cacgcccactgctggaacctgcggagccacacccgtgcacctttctactggaccagagattattcggcgggaatcgggtcccctcccccttccttcataactagtgtcgcaacaataaaatttgagccttgatcagaaaaaaaaaa

SEQ ID NO: 3938 - DNA, 228 bp, Homo sapiens
gactgagtctcccctcccccagcctgaacctgcttactcaggggtggagcttgccgctcaatcgttctgccacgcccactgctggagcttgccgctttgctgtttcgaagccatcacgtgttcacctgcaaccttactcctagattatttggcgggaatcggcccctcccccttccttcataacggagtgctggaatagtaaaaattgaaccttgagcaaaaaaaaaa

SEQ ID NO: 3939 - DNA, 185 bp, Homo sapiens
  misc_feature (1)...(185): n = A,T,C or G
aactgagatgactctagctgatgtcacgttaacaactaaccanccagcacaactagcctcatggatgcgtcagatagaacacggatattaagacaaacagnctgacccaagactgctgactcagctctccatctcctgatctcttcccacagctcaggacggaacagatcagcccctgctcactg

SEQ ID NO: 3940 - DNA, 221 bp, Homo sapiens
  misc_feature (1)...(221): n = A,T,C or G
tctgagatgcgagtaccaaagctaggaagcaacaactcacccatgantgctcaaccagtgaangctanattcaaacccagncagccagtcagctggtttagagagtgaagacacttgactgacattcccngggaagatgctctcaacagntgtacgtggtgaggaanatcaaccntggtccaccttgagaccnncccatttctatcacccgtgtctctcaa

SEQ ID NO: 3941 - DNA, 392 bp, Homo sapiens
  misc_feature (1)...(392): n = A,T,C or G
taagagcactgcctgctcttccagagggnctgnnttcaatttccannaaccncatggnggctcacnaccatctgnatnggcganctgatgggctcttntggtgtntcngnggacagcnacagagtactcatatacgtanaananacattntgatacctngctgncaagctctggttngcagaagacttcacagaatggaaggaataaaaaaactccagcagaggctggtgaggtggctcagtggttaagagtgccgactgctcttccaaaggtccccagttcaaatcccagcaaccacatggtggctcaccaccatctgtaacgaaatctgattccctcttctggagtatctgaagacagctatagngcacttacatgtaataaatgaatct

SEQ ID NO: 3942 - DNA, 200 bp, Homo sapiens
agactgagaagtctaaggttcagtatcattcaagacaccactttctcaagatggtctttaagaaggctcagtgggtaaaagtgcttgatgccaaactcggcaacccgagttcgattcctggaacacacatggtagaaagagagaacagaaacatggacactaacgtgacttatacatgccccttgtttcaaaaaaaaaaa

SEQ ID NO: 3943 - DNA, 480 bp, Homo sapiens
tgagactataggacagcaggtctctgacaggccgaatggaaaacactcgcactacagcttcaggaagggggctggagagatggcaggaaagagctagcactgcccctgcagaggctggagttcacttcccggcactcaggcacccacattaggtggccacaacctggaatcccagctccagggacttcaacccctctctccagtccccttgggcacctgaacagacccacacacagaaagacgcatgtagcattaatttttaaaagattaatgggactggagagatggctcagctgttctcagcagtggactgctcttccaagggatcagggttcaattcccagcacccacatggaagctcacaattgtctataaccccagttccaagggatccgatacccttccacaggcatgcattgccggcaaaacaccaatggcatataaaataataaataaaaatattttttcccaaaaaaaaaa

SEQ ID NO: 3944 - DNA, 283 bp, Homo sapiens
  misc_feature (1)...(283): n = A,T,C or G
gactgaggtgtctcggaacaaggtttctctgtgtagttctggctgtcctanaactcagagatccacctacctctgattcaaaggactaggattaaatgcccggttaaagaanatactccagggctggagagatggctcagtggttcagatcacagactgctcgtccagaggtcctgagttcaattcccagcanccacaaggtggctcacaacacctcttctggtgtgtctaaagacagcaacagtgtattcatgtacattaaatgaataaataaattgtaaaa

SEQ ID NO: 3945 - DNA, 221 bp, Homo sapiens
  misc_feature (1)...(221): n = A,T,C or G
gactgagggaggagatgtagtctcccctcccccagcctgaaacctgcttgctcggggtggagcttcctgctnattcgttcngccacgcccactgctggaacctgaggagccacacacgtgcacctttctactggaccagagattattcggcaggnaatcgggtcccctcccccttccttcataactggtgacgcaacaataaaatttgagccttgatcaga

SEQ ID NO: 3946 - DNA, 207 bp, Homo sapiens
  misc_feature (1)...(207): n = A,T,C or G
gagactgagattacaggtgagaacatcggaggagttaatcagncggnaccatgcccaagacacaggtcaagagagaagagtcaagagttcatttcccagcagggacctaaactcccacatctgtgaaatgttcacaaacgtggcttttggattctcatcctatataaggaagagtgggaagaatcagatcttataaaacaaataaaa

SEQ ID NO: 3947 - DNA, 317 bp, Homo sapiens
  misc_feature (1)...(317): n = A,T,C or G
atgactgtgtcttcacatacgactgcagtactgcagagaagaaggccacgccagaagataaaggggaggacggacagcccgcagacacagggagtgactcgattctggcgtccaccttctccaagtctggccgctattttgctttaacagatgacagatggcggcgnggnntttnnccgacctgnncttcacagtgtcagaggnccangtntnggtggctngacaagcntggagacgactnctcctttactngngctggagncagatggatgtggnnnnctggngctagnncaactcttccatgctagcttgacgtg

SEQ ID NO: 3948 - DNA, 161 bp, Homo sapiens
  misc_feature (1)...(161): n = A,T,C or G
gattcgtggttgagcagacccagtccaccatggtaatgcctatgggctncccaggggatggnncctgataggcctgcagctatgttcagcctggtctacatagagagttccangacagccagggatacacagagaaaccctgtctcagaaaaaccaaaaaa

SEQ ID NO: 3949 - DNA, 284 bp, Homo sapiens
  misc_feature (1)...(284): n = A,T,C or G
atactgattgctcccngtgaatgatgnagaaacttttacanantcgctgccantgcatctgntttgcanaagacttnacagaatggaaggaataaaaaaactccagcagaggctggtgaggtggctcagtggttaagagtgccgactgctcttccaaaggtccccagttcaaatcccagcaaccacatggtggctcaccaccatctgtaacgaaatctgattccctcttctggagtatctgaagacagctatagtgcacttacatgtaataaatgaatctctaa

SEQ ID NO: 3950 - DNA, 170 bp, Homo sapiens
gactgaggtgcccttgaaagccagagtatgtcagatcccctggagctggctcaggagccatccaacatggatgctaagaaccaaactcaagtcctttgggaagagcagcaagtgctcctaacctcggagccacctgggaatttcttttaaaattaaaacattggaagatt

SEQ ID NO: 3951 - DNA, 141 bp, Homo sapiens
  misc_feature (1)...(141): n = A,T,C or G
acgcgctacagagatgtggacaatnttttattntagagacactgnttttggtcattcaggccaactcccctatagctgtaaaaagttgtgtaccttacctgtatgctatattgntagataattttaagagttaagatcaca

SEQ ID NO: 3952 - DNA, 110 bp, Homo sapiens
actgaggtttctgtctaagtattgattggagccagagacacttccgactgatgacaatacctcttttcaaatcaataaaatgcctacgtttaaagctttaaaaaaaaaaa

SEQ ID NO: 3953 - DNA, 228 bp, Homo sapiens
  misc_feature (1)...(228): n = A,T,C or G
actgagggaggagatgtagtctcccctnccccagcctgaaacctgcttgctcggggtggagcttcctgctcattcgttctgccacgcccactgctggaacctgaggagccacacacgtgcacctttctactggaccagagattattcggcgggaatcgggtcccctcccccttccttcataactggtgtcgcaacaataaaatttgagccttgatcagaaaaaaaaaa

SEQ ID NO: 3954 - DNA, 192 bp, Homo sapiens
  misc_feature (1)...(192): n = A,T,C or G
agacactctatcacagnggtaanggcacatagcaacatanctgctnagaanaggtntttttttctnacnnggctgncgggctctaaagcaagcaggctncgactctcaaacaactccaatgannggcactgcagtgattncaaaagaaaaccttgganantatccctanatacatgggacattaaaaattgg

SEQ ID NO: 3955 - DNA, 244 bp, Homo sapiens
  misc_feature (1)...(244): n = A,T,C or G
gactgagaggagttgtggccttgttgggagaagttgtgtcactgtgggtgtggacttaagacccttaccccanntgcctggaagncagtcttccactagcagccttcagatgaagatgtagaactctcagctntgcctgcaccatgcctgcctggatgctgccatgtccaccttgaagataataggactgaacttctgaacctgtaaaccagacccaattaaatattgtctatgaaaaaaaaaa

SEQ ID NO: 3956 - DNA, 404 bp, Homo sapiens
  misc_feature (1)...(404): n = A,T,C or G
taagagcactgcctgctcttccagagggnctgcnttcaatttccagnaacnncatggtggctcacnaccatctgnatnggganctgatgggctcttntggtgtntctgnggacagctacagngtactcatatacgtanaananacattnngatacctagctgnnaanctctggtttgcagaagacttcacagaatggaaggaataaaaaaactccagcagaggctggtgaggtggctcagtggttaagagtgccgactgctcttccaaaggtccccagttcaaatcccagcaaccacatggtggctcaccaccatctgtaacgaaatctgattccctcttctggagtatctgaagacagctatagngcacttacatgtaataaatgaatctctaaaaaaaaaaa

SEQ ID NO: 3957 - DNA, 345 bp, Homo sapiens
  misc_feature (1)...(345): n = A,T,C or G
gactgagggaacactacanggttttgaccanaccattaacttgattttggatgaaagccatgagcgggtgttcagctcttcacagnnagtataacaagtggtgttgnggttatacattgtgaggggcgacatatgtatcagtcattggggaaatagatgaagagacgnattctgcactccacttggggaacatccgagcagagcctctgaactccgtagcacactgagacctcagtgtgtagtgagatgtgtgtaaatcctgtacagaagcgtctgtcctgagagtgatgtttagggtttttatgagtgtgtaattgggcagtttgacttcatgttggtacactg

SEQ ID NO: 3958 - DNA, 198 bp, Homo sapiens
  misc_feature (1)...(198): n = A,T,C or G
gcacctttctactggaccacagantattaaagctggcaatcggnncncctcccccttgcttnatanctggaggaacnncaataaaatttgagccttgatcanaatacttaaanttgccactacctgnggtagatggngggctaaaagatgttaaaacatttaagaaccatcattaaaaatagatataaaataaagaaa

SEQ ID NO: 3959 - DNA, 514 bp, Homo sapiens
actgaggtggggtctttaacccactggagtgttatcagagtggaacaggatcaagggacgctgagcgctgcgctttgtatctgaatctgtggaaaactttatcctccgggtcagaggttcaaggcatctggagttggcaacaaagctgtgtggaagagtgcaggaaagatcctgcaagaaaggcctggcctcctagttctggtatgctttcttctgcagcctccagctccagggctcccctcatcaggagccacagcacagcacacctgctggcacaagaccagggtctcaacacaaggcacagtgccctttctgggcatcatctcagtctctctgcatttattaatttatttttaaacataatataatccactgatactgttattcaataatttctaattcatgatcatctttcctatccatccagttgtactctatcctgattgtactaccatctaataagctatgaagacaaagcagactcacatatccccatacaatctcctatgccttc

SEQ ID NO: 3960 - DNA, 252 bp, Homo sapiens
ctgaggcaaaacatgtctgctagtggcacgtctctcttctgtggattgaagacatcaagagctatgaaggaatcaagacaccataaaactccacacagctagctcatcctttgatattgggagcaaggaaacactctctatactggaatggataagttagccaggacccacagaattaaagggaatgtgcactggttgaagttggaagaaacaggaaaataaaatcacttgtttgtgcttgaaaaaaaaaaa

SEQ ID NO: 3961 - DNA, 157 bp, Homo sapiens
  misc_feature (1)...(157): n = A,T,C or G
tattgatggacggccttttnctcngtnacagacgagacactaaanccnttgaancctgcacaaggaaatntattnaaaacccattnngacattcttganggcctcccccngactggggctcccccagactgcggctctncctggctttgaattgata

SEQ ID NO: 3962 - DNA, 283 bp, Homo sapiens
  misc_feature (1)...(283): n = A,T,C or G
gactgagtgcctgcccacaagccaagcaaatgacttgctgtggaagangaaacggctgaagacanntcgtgcanaaccagntacaaggganttgntnganantactctactgnnaaactnaaaggcctttcgnctcctcaccatgaagtgtttccgaggacaaagtgggcctgaagtgggggaagctaatcccatttccagagcctgcttctcaatgagccccccaaaatatgtatgaatttactaatataacgccaccccctactaagtggaaaaaaaaaaa

SEQ ID NO: 3963 - DNA, 139 bp, Homo sapiens
  misc_feature (1)...(139): n = A,T,C or G
actgagggtttcgggctggtgagatggctcagtgggtaagagcgcccgactgctcttccgaaggnccagagttcaaatcccannaacnacatggnggctnacaaccatncgtancaagatctgactcccccttctggtg

SEQ ID NO: 3964 - DNA, 187 bp, Homo sapiens
  misc_feature (1)...(187): n = A,T,C or G
gactgaggtgcctggctgaggacgtcctccccagggcagccgntgtgccgaggaggggcgtgctggtcaccatgacaacagagacagnncccgattctgaggtganganggctcaggaggantnatccngagctcancntnnattcaatncactgantcctcgcagagttccctattctatacattg

SEQ ID NO: 3965 - DNA, 242 bp, Homo sapiens
  misc_feature (1)...(242): n = A,T,C or G
gccagcagccacatggtgtttnacaaccatctgaaatggaattcagtgccttcttctggtgngtctgaagactactacagtggtactcataantaaaataaatcttaagccatgcgnggtggctcagcactttgggaggcagaggcaggnggatttctgagttcnaggcctgnctggcctacaaagtgagttccaggacagccanagctatacagagaaaccctgtcttgaaaaaacaaaaa

SEQ ID NO: 3966 - DNA, 189 bp, Homo sapiens
  misc_feature (1)...(189): n = A,T,C or G
actgagcttggctgaagaggaaataaaaactgagcaggaggtggtggagggaatggatatctctactcgctccaaagatcctgtctctacagagaaaacggncccgaaacggaagttccccagccctccacattcctncaatggccattcgccccaagactcatccacagagccccattaaaaaaaaaa

SEQ ID NO: 3967 - DNA, 190 bp, Homo sapiens
  misc_feature (1)...(190): n = A,T,C or G
aacctgattgctcggggnggagcttctgctnattcgctctgccacgcccactgntggaacctgaggagccacacacggtgcacctttctactggaccagagattattcggcgggaatcgggtcccctcccccttccttcataactggtgtcgcaacaataaaatttgagccttgatcagagaaaaaaaaa

SEQ ID NO: 3968 - DNA, 210 bp, Homo sapiens
  misc_feature (1)...(210): n = A,T,C or G
gactgaggtgtctttccgtacagcagcancctaagggtntgtgcagcaatgaaatgacattgtttatcaggagcccgactctacaggatgtgaaagagaacgctatacagagagcattcagaaaagctgattctgccactctccactgaaatgaagcagaaaatgttcaatcacgcantcaaaatanaagcactaggcctgcaaaaaaaa

SEQ ID NO: 3969 - DNA, 226 bp, Homo sapiens
  misc_feature (1)...(226): n = A,T,C or G
actgagggaggagatgtagtctcccctnccccagcctgaaacctgnttgctcggggnggancttcctgctcattcgttctgccacgcccactgctggaacctgaggagccacacacgtgcacctttctactggaccagagattattcggcgggaatngggtcccctcccccttncttnataactggtgtcacaacaataaaatttgagccttgatcagaaaaaaaa

SEQ ID NO: 3970 - DNA, 369 bp, Homo sapiens
  misc_feature (1)...(369): n = A,T,C or G
aactgaggtgcctcaggctgcctccccccatgatcctgangactagagttagagggccaggnnctgctcantgatngncatcnacaccttttggcatatnagacntcaccccnnccttnatgnacacctncctnntgaaaggnggtgnncgggggngagaaatnntaaccgatgannancggggaaactttnatcatggtcacgaaggtgtctgcctgcatttnattttcatgctgnanggttgctatttttctctctgnaaaattaaatggttagggatgcaacttggngttaggatgctaacccagcatgcctgaggccctgggttcaattcccggcatgatgaaaagaaagggaaataaaaatgta

SEQ ID NO: 3971 - DNA, 146 bp, Homo sapiens
  misc_feature (1)...(146): n = A,T,C or G
ccgaacctgcttgctngggggggagcntcctgctcattcnttctgacacgcccnctgcttggaacctgaggagccacacacngtgcaccttactactggaccaagagattattcggcgggnaatcagngtcccctcccccttcctt

SEQ ID NO: 3972 - DNA, 242 bp, Homo sapiens
  misc_feature (1)...(242): n = A,T,C or G
atctgaggacatttgcttnagatcctattgcacccaccaactccacctgccaacactatgtntgcaaaacttgtnaaggcnanaaaatgatgatgnaaccttnatgtngctgnagcaaagactatgagcagtttgaggagaacaagcagttaagcatcctagtgaattgctacaagaaactgtgtgaatatataacccagacgacactggcacgggatataatagaagcagttgactgttaa

SEQ ID NO: 3973 - DNA, 149 bp, Homo sapiens
  misc_feature (1)...(149): n = A,T,C or G
tgaggcccctcccaagagagaaccatanccaaaactgcttggatgaccaagantctaagattagatagcccagggacctagggtaatgccaaatactactgtcctactagaagaacgcaccaataaaatgactcctaaagacaaaaaaa

SEQ ID NO: 3974 - DNA, 427 bp, Homo sapiens
  misc_feature (1)...(427): n = A,T,C or G
cttctgaggtggggtctttcnagantctgtagcagnccaggaagagggtggtggagtctctggaactggacattggagttactgttgtgagctgccatgtgttctggaaaagcagagccgcctccgactgtcctggctttatcattgttacagtagtgccgccggnctgactccagcctcccaagccctccagctcatccagaagtggactaatggggatatctcagagatacncacagcagtggaagtatttcctcctcagaggtcttcagggtttatcctctctcagaacccaagctcctgatagtttaagaagcaataaattaactcttctattacaggaagaaanagaagntctcctacggggnataaaatccaagcttgcttcctggttttgaaaagtcaccattgagcttaaaaaaaaaaa

SEQ ID NO: 3975 - DNA, 216 bp, Homo sapiens
  misc_feature (1)...(216): n = A,T,C or G
ttgccccagcaaaccaacaccggnggacaaantagctcatagtnactaaagatggtgactgtaaaaaattaactccaaagaagagngaaagaacaaaaattnnctccatgggagcngggaaatagctcgngcctgctcaagccttcctntttanaggattcntggaataatatttcctttattaatggacagtttttttnttgattaaaaaaaaaa

SEQ ID NO: 3976 - DNA, 151 bp, Homo sapiens
  misc_feature (1)...(151): n = A,T,C or G
cactccaccctttggtntgaggaaggcacaagntcaccgggagncngttgctgctcaaggcatcttctggtccacagagaccngatccccagcctctacttttccttttctcgaagcttggatacccagaataccagcttgcccatgaagc

SEQ ID NO: 3977 - DNA, 288 bp, Homo sapiens
  misc_feature (1)...(288): n = A,T,C or G
ttctctggaagataaagagganggactgaaggaccagagaagtcanggncaccatgnganaacttagaancaaganacctggattcctagggcctcattgagcctgnactgcccaagggcctgcctcatttttttcaatnggncaacttgggcttcaagtgagagccctaacagcaganacaagggctgtctctgactctgttccctgcctttggattccctttccctaacaaggctgccttgacnaaccttgataggaaaaacatgcncaatcctattttcaacttg

SEQ ID NO: 3978 - DNA, 166 bp, Homo sapiens
  misc_feature (1)...(166): n = A,T,C or G
ttctgccacgcccactgctggaacctgaggagccacacacgtgcacctttctactggaccagagattattcggcgggaatcgggtcccctcccccttccttcataactggtgtcgcaacaataaaatttgagccttgatcagagnaaaatttttaaaaaaaaggtt

SEQ ID NO: 3979 - DNA, 117 bp, Homo sapiens
  misc_feature (1)...(117): n = A,T,C or G
cctatagcaccatgcctgcctgcccactgccatgcttcccgccttggtggnancagactaaacctctgacgctgtaagccanccccaattaaatgttttcctttgtaaaaaaaaaaa

SEQ ID NO: 3980 - DNA, 199 bp, Homo sapiens
  misc_feature (1)...(199): n = A,T,C or G
gactgaggggcttctgactcctcacccaggncaaagaactctccaggaggctctgatcatggatccacggtgacactgattaatgaaatggagactgatgaacgtggaaacaggcattcaagtacaaaanganaccatgacattatatgtcaacactccagggtgaaggtggncagagatagaaggagtgcggcagtct

SEQ ID NO: 3981 - DNA, 418 bp, Homo sapiens
  misc_feature (1)...(418): n = A,T,C or G
gactgaggtgagactatacacagaggtncatctaatgattctcgggacagttaaaagaggttcactagggctgatctaaagaggcacgaaccctgtcaggntgcgtgnagttagtgaagagaggcgaaggacacagccacagaaaagcaacggntttttttgacacggngtgctgagaagcttacgctacagcctggganaccgggtctgaggagaactccggacttatnataccccaaagctntggggtgggggtggccaggtaaggctctccctctggggcagnaaaaggacttcggccaatcacagcctttcctcaaggagaaggctacacctttcctcgtntccgccctctgggccaagtgaccaatctgcaagcgcctacaggaagncgctctcantatagccaataaagcag

SEQ ID NO: 3982 - DNA, 195 bp, Homo sapiens
  misc_feature (1)...(195): n = A,T,C or G
agggcccttgagatantctggngacagcatccngccgatcacctactggctggcgaagggcaccaagaatggattgtttggggggggcgggngaggaatgntncaacanggccacacctccaagtagtaccactccctgggccaagcatattcaaaccaccacgtcatcctatagaaactcctatacttcctaca

SEQ ID NO: 3983 - DNA, 141 bp, Homo sapiens
  misc_feature (1)...(141): n = A,T,C or G
gagcatatgatcagcagatatgggaaaagtcaatcgaacagactcagattaaggnactgaannagggnnagatcagtctctggtcancttacagggaatcttcgctnttaattnntgaaaattgactattttatattacat

SEQ ID NO: 3984 - DNA, 284 bp, Homo sapiens
  misc_feature (1)...(284): n = A,T,C or G
ggggacacaccttacagatttggtngcccnacatgactgtagtgacatcatctgggaccttgctgagcctcctcaggatgacttatggctctgaagaaatgggngaggctagtgaaggagctggaccctggaggagctctaaggatgcagggcttttgttggccttggngcttcccaaactccttgccatgaagcaccgnatctagagangcaaaggttnttttttcagaccggggtgatccgccaaaatggntgncactgcttncaggaggcactggaaaact

SEQ ID NO: 3985 - DNA, 223 bp, Homo sapiens
gactgagagaatcttaaaaagaagaagaagggggctggtgagatggctcagtggttaagagcgtcgactgctcttccgaaggtcccaagttcaaatcccagcaaccacatggtggctcacaaccatccgtaatgaaatctgatgccctcttctggagtgtctgaagacagctacagtgtacttacatataataaataaataattctttttttaaaaaaaaaaa

SEQ ID NO: 3986 - DNA, 124 bp, Homo sapiens
cccttggtgctaccacttctgagcatctggatgtctctgcagtgttggggtactactagtgtgtctgaagacagctacagtgtactcatatcaaatatataaatatttaggggaaaaaaaaaaa

SEQ ID NO: 3987 - DNA, 191 bp, Homo sapiens
  misc_feature (1)...(191): n = A,T,C or G
gcgacgtgaaacataaccatagangccatctgtcagtgcctcctcactgcccatgtactatcattantgtcntnntcncncnngnaatgcnanaccaacccgcancnccaggaacagccctgaggacttcacatagccaatgcttagcagnctgcttanntgtctacccactgctggaagctaaaggcacc

SEQ ID NO: 3988 - DNA, 370 bp, Homo sapiens
  misc_feature (1)...(370): n = A,T,C or G
gactgagagtttgacagttagtcagcttgngtccctcactccctgatccatctctgcttctgaagctccgggnttacaggtggccaccagccttgaataactactgatgatccaaaccctgttcttcatgactgcatggcaagcactaaccacagacccatctctgcagtcccatcttattttgagacagactcttactatgtagctgggctcagactggcctccaatctgcaatactntttatcctgctggaattacaggcatgcaccaacatacttggtctttaanggatagaattnatttattggatgtgttatgggcatacacaatgctgngactcacctggccatttatcttgaactggattttt

SEQ ID NO: 3989 - DNA, 160 bp, Homo sapiens
  misc_feature (1)...(160): n = A,T,C or G
catgcaaggccagaagagngcgtggnatcccttgnaactngagttacagangattnttgngccnccatggtgagggctggaaataganttctgggcctctggaacagcagncagggatcttaactgctgagccatctntccagccccgagtatttaaatc

SEQ ID NO: 3990 - DNA, 266 bp, Homo sapiens
  misc_feature (1)...(266): n = A,T,C or G
actgacaacacccgaacctggaattacaggnggctgatccctgcctgggatggctactgggaactgantgaagcactaaaaccactgagccgtccctccagtaccagtgattaacactagctgctcttccggaggaccaagatttgattcccagcacacacatgatggcctacaaccttccatcaactccggttccagggatcgcacaccttcttcttttagcctccatgtgcactgcattcaccgtggtacacaggcatatatac

SEQ ID NO: 3991 - DNA, 312 bp, Homo sapiens
  misc_feature (1)...(312): n = A,T,C or G
aacagcagcgcacgacacacccgancctggattacaggnggctgatccctgcctgggatggctactgggaactgantgaagcactaaaaccactgagccgnccctccagtaccagtgattaacactagctgctcttccggaggaccaagatttgattcccagcacacacatgatggcctacaaccttccatcaactccggttccagggatcgcacaccttcttcttttagcctccatgtgcactgcattcacgtggtacacagccatatatacaggcaaaataaaatgctcatacacacaaaaaataataaa

SEQ ID NO: 3992 - DNA, 156 bp, Homo sapiens
  misc_feature (1)...(156): n = A,T,C or G
tttgctcaaccagatgcantcaggccttcaacngatcaatantaattgcagncggagaacatancancccnccagnaagccnnncccccgatgctctgcttccaaagaaggcancccacagtnnagacaacaagccttccaggcgtaagtggaaag

SEQ ID NO: 3993 - DNA, 212 bp, Homo sapiens
  misc_feature (1)...(212): n = A,T,C or G
ggaacagaactgaggaaagtcggaagcaaaacagctagacacaaagaaaagcagaagtgngcgtctcagagactggccgtcccccagcgggactgaaccgtggagcgtccagccgtggcctgcctgccggtgacccgtgtgtgggagaaatgacccaactggcctcagctgtgtggctgcccacactgttgctgntgctgctgcttttttgg

SEQ ID NO: 3994 - DNA, 146 bp, Homo sapiens
  misc_feature (1)...(146): n = A,T,C or G
tgaggtgggtttgggctgaggtagagcctnggcannggccananttactttntgnggaacnctcaaganctgagcaggctngatnaagctgactttacaggatgggcgtgnggccccaaaacccagcatggaaatttgaagaggga

SEQ ID NO: 3995 - DNA, 198 bp, Homo sapiens
  misc_feature (1)...(198): n = A,T,C or G
ctcccgctacaggctgccatctgtantgntgcccggtctaccgcaggaaacgctacagaatgantgaacacaccaaagcaagagagccgcagagagccctggctctggagccggactgcgggactcagtgtccggctttgccgtccaccctcaggttgctcatctgtatagtgggaatgagagtagcagctactgtct

SEQ ID NO: 3996 - DNA, 231 bp, Homo sapiens
  misc_feature (1)...(231): n = A,T,C or G
caggctgctgcgaccaaaccaccaccgtccatctgnctgccgccngcatgggtgcggtnggtccnnaggttacnaatgtgccagcactcctggagagagcngcctgctgctggnggnttcngcagggaggagatnnngtctcccctcccccagcctgaaanntgcttgctcggngtggagcttnctgctnatttattntaacacgacnaatgntggaacctgaggagccac

SEQ ID NO: 3997 - DNA, 121 bp, Homo sapiens
  misc_feature (1)...(121): n = A,T,C or G
gaactgagcactaaacaagnattgatgatgaaatgngagcctgggaacgaactcttttcaagtagagtttncaganttttccagcaccatantgataaaacaaaaccagcagcgccagcgg

SEQ ID NO: 3998 - DNA, 273 bp, Homo sapiens
  misc_feature (1)...(273): n = A,T,C or G
tcctagagatgaatcggaagccctgacctgctggctctacctgccaagctccaggattacaggtgtgcaccagcacacgtggcctgaaacttttccttctatattagctgttaaggtctgcagtacaaagataaactcaaaatgaacacatttccttttgtgttcctacttacgtgtgaggcangttagggggtccttggggctccccagaaagtggagccgtcantactgagcgagatcctgggcaggtcgggagggtcccatgagtgggca

SEQ ID NO: 3999 - DNA, 105 bp, Homo sapiens
  misc_feature (1)...(105): n = A,T,C or G
acgcaggtttccttaaatacctagnatatgatgcatcaatagttcatgcattaaaagctcatctttccaaacnttnaataaatacagtattttggtcaaggttta

SEQ ID NO: 4000 - DNA, 408 bp, Homo sapiens
  misc_feature (1)...(408): n = A,T,C or G
gaactgagggaggagatgnnntctcccctcccccagcctgaaacctgcttgctcggggtggagcttcctgctcattcgntctgccacgcccacatgctggaacctgaggagccacacactgtgcacctttctacatggaccacgagattattcngcggnaatcggancccctcccccttccttcataacatggtgncacaacagataaaatttgagncttgntcagangantcaagncctacacggggacancattgaggnggcncccgacnccaaggagaggcgtgatgttcctgaactttggcanaanntctaaccntcagggcactcagcctacagacggcatgaatttcganaacnccncgtgnagctgnccaatctgnaatgccatattttcaatacacctga

SEQ ID NO: 4001 - DNA, 297 bp, Homo sapiens
  misc_feature (1)...(297): n = A,T,C or G
gactgaggaattgtatcatgtgnantgaagactncagtaactacgcnntgaaanncgtttggngagaggccttntcangaggcnanantccggngctggtgagangnntaagcangtagtgagcaccccactgntcttncanaggtcctgagttcaagatcccagcaaccacatggtggctcacaaccntccctaatgagatntgactccctcttctggtgtgtctgaagacagctacagtgtacttacatataataaattaataaatctttaaaaaaattcatattaaaaaaaaaa

SEQ ID NO: 4002 - DNA, 236 bp, Homo sapiens
  misc_feature (1)...(236): n = A,T,C or G
ggaagacgcctccttggcngtaagggggangaggatnaaagttcaaagccatcttcaganacacactacagaactcatggncaggctggtttacatgagaaccgctagcagcagcacaacactgcagagcaccctgngntactaagaacatggcnagcgtgccccgcccattancagnnaccaagtatacactgagcatgcaccgctccccgacggaagccgagaaggaaaggggc

SEQ ID NO: 4003 - DNA, 233 bp, Homo sapiens
  misc_feature (1)...(233): n = A,T,C or G
gactgaggtgtcttgccngtggtggaaactatccccnaggaatccaggcggnggtggcagggccggcctcctaccgatgtgggaagaatggcggaccacaccctgagttctctctgtcaccctggctttcttggtctgtcacacacntgacanntactttnggggcaaaccacatnttnatcttngncttttgngttttctggatataaatagtcttttctgaaaaaaaaaaa

SEQ ID NO: 4004 - DNA, 220 bp, Homo sapiens
  misc_feature (1)...(220): n = A,T,C or G
gaactgagggttcccagactgccctttgngcaataaaatgggaggccacaaccaaagtcttttggataaagcaccacaatggacaatgtaaggaaggcagccaaactgctttactgctttcccaaggcacagatctttcccagcatgggaaagatcctccctccctccctccctccctccctccctccttccaccatacacntcaataaaataaaataaa

SEQ ID NO: 4005 - DNA, 281 bp, Homo sapiens
  misc_feature (1)...(281): n = A,T,C or G
gaactgagatactccagcangagggcatcagcanttcgttacggatggatgtgagccaccatgtgtntgntgggacctgaacccgggaccttcggaagagcagtcancgctctcaaccactgagccatctcgccagccccctttcttttgtgttttaanaacttaaataaacaggntcttacttatgtacccaanacccantntanaaagtcagtgacantgatattctgcctgaggcatcaaggggtcaaagtgtcctccctatcctcccccccccccac

SEQ ID NO: 4006 - DNA, 242 bp, Homo sapiens
  misc_feature (1)...(242): n = A,T,C or G
gactgagcctgggaccccaagccaaggnacagttttgccaacttttatgctggttctgcctgtaccaggtcatggnagaaaaaacngccacagctgccatccttaantcgacncacaggtcncnnnctnctcatcangnaanactnntgcatnggtcgaggctcccacttactcactcannctggcaanagcaacacgtgancccttggagatccagggaatnacatgatcctcttggaggg

SEQ ID NO: 4007 - DNA, 448 bp, Homo sapiens
  misc_feature (1)...(448): n = A,T,C or G
gaactgaggtgggtgaagcccttctagncctganctttgaggaaagaagacacacatatttgatntggatntctanggaggagccgcatctttaatccaggccacaccttctgccagaagcccatataagagcatggaaaggggaagcttttgttctttgcctgctcacccttgctttgttagcaagtccagctctgcacatggtgtcagaacccactttctgtgcccttcccagccttgagcatgctgaacagaccatgagtgcttgccaccatgggcttaatgacctagtggagtcatctgccttggttacatctgcaacttcctacaggaacttagaagaatacagcaacgtagtccagctgaaacagaggatggttctgtaagattgccctatataaatgcagtgctcaaaattaaacttggaaccttgaccagaaaaaaaaaa

SEQ ID NO: 4008 - DNA, 311 bp, Homo sapiens
  misc_feature (1)...(311): n = A,T,C or G
ctttctacatacatactatcttantgttnttaganacagagcatagcatacncatgtgtgtggggatnctaggctctggactctcatcaggacgaatggcatcaggtgaactgcattctnacacctttacttgaggtngtnacctgnantannctcgtcgaggngtgattacaggctgacanactcagcantangnantannatggnnncnttgaataaatgaatggaaaaaccccaaggccttcccccagcaccaacctccacagacttcaaatactgtttgaccctaacatgactcaacttgaaagaga

SEQ ID NO: 4009 - DNA, 109 bp, Homo sapiens
  misc_feature (1)...(109): n = A,T,C or G
acctacctttgcttaacaccttgcagnaacatancatganacccnttatcactaaggtatcntatttggagacccagatttattaaagagcnatttattgaatatttta

SEQ ID NO: 4010 - DNA, 370 bp, Homo sapiens
  misc_feature (1)...(370): n = A,T,C or G
gcagcctgggcggaggccnagantanngaagggtgnaantntngagcatttgctgctcctgcagaggcccgggttctgnncccagcacccacaatggngacctacagcgtgcctgtaacctcagcgtacnggggtgtccgataccttcttctggccttcatgacacacagacaagtgagcacacacaaaagtattttttaaaaataaattaataggctgggtgtggtggtgcacgcctttaaacccagcacttgggaggcagagacaggcggatttctgagttcgaggccagcctggtctacagagtgagttccaggagagccaggactacacagagaaactctgtctcgaaaaaccaaaaataaataaa

SEQ ID NO: 4011 - DNA, 226 bp, Homo sapiens
  misc_feature (1)...(226): n = A,T,C or G
tatttctgtggcagtaaaagaaaccgattctatngggctggagaganggctnagcgggnaagagcaccnactgaccttctagaggtntctgagttnanannccagcaaccanatggtgnctgacnnccatncataacaagagctgatgccctcttctggagtgtctnaanacagntagagtgnactttgcatataataantnngtacatctttaagaaaagaaaaa

SEQ ID NO: 4012 - DNA, 258 bp, Homo sapiens
  misc_feature (1)...(258): n = A,T,C or G
gactgaggaagacctggtaggccctcatagcccatttccagaccttggctgccaaaaagacccaggtcacagaaacaccatgtcctccaccctccccacggttaaactgcctccctgtctgctcatcctgagaaagangagctgatccttttcggaggtgaatatttcaatggccaaaaagtaaagtatatgtttttctttcctcccaacctttcggggctcatttgaagtaaatttaagntggtgataaaaaaaaaa

SEQ ID NO: 4013 - DNA, 230 bp, Homo sapiens
  misc_feature (1)...(230): n = A,T,C or G
actgagggaggagatgtantctgcntaccctagcctganncctgnttgctnngnggggagcttnctgctnattcnntctgccacagcccactgctggaacctganganccacacacgngcacctttctactggaccagagattattcggcgggaatcgggtcccctcccccttccttcataactaggtgtcacaacaataaaatttgagccttgatcagagaaaaaaaaa

SEQ ID NO: 4014 - DNA, 274 bp, Homo sapiens
  misc_feature (1)...(274): n = A,T,C or G
gactgagagactgaatcaccaaagagcaagcacgggctggacctaggccccctgcatatatatagcagatgagccacttgatcttcatgcaggtctcccaaacaactggagctggggctgtccctgagtctgttgcctgcttgtggatgcctgcgcccctaaatggacagtcttgtctggcctgggtgggagaagatgtgcctactcctcctgcagggacttgatgtgcagggggcgggggngggggagtgacatttgagatgggggccttccc

SEQ ID NO: 4015 - DNA, 189 bp, Homo sapiens
agactgagcttggctgaggagaataaaaactgagcaggaggtggtggagggaatggatatctctactcgctccaaagatcctgtctctacagagaaaacggccccgaaacggaagttccccagccctccacattcctccaatggccattcgccccaagactcatccactgagccccattaaaaaaaaaa

SEQ ID NO: 4016 - DNA, 439 bp, Homo sapiens
  misc_feature (1)...(439): n = A,T,C or G
ccagactgaggatgattttgacctntgttgnttactatncgatgacannaaacacgaggnatgangggangtctggtcancgaccccggaggcaggaactgatacagaggtcatggaanagtgctgnttactggnttgctcccatggcgttgctcaacaggctttcttgagaactcannaaacctctgcatgagagagtcacatncacagtactggncccttccacatnaaccannnaactgctctacagccttgcctacangctaatctgatagaggcattttctcacttgaagttccttcttctncgatgactctggcttgtgncaaattgagaactaaccagaatactgtcaacgatcatcanaccacanaagcgnggtctacttggggactttacattctgcttacctgatccgnataccggcttcctttgcccg

SEQ ID NO: 4017 - DNA, 324 bp, Homo sapiens
  misc_feature (1)...(324): n = A,T,C or G
ctaagccacctaggangtgntntggttgtcaaactnanttgtggagccttggatgcccttaaacctctgatcttcctgcttccatcctggaatgctgaccttacaagggagattctccacacntggtttattnagggctagggaactgaacttcctacgtgctaggcgagctctctaccaactgagccctagccctagattctttgaatcttgatgatcccccaaaggctctagtgttaaaggcttcgtccccagagtggtgatattaggaggnggtggaacccttcanagaaggagccgaacttgacctggctgttaagggat

SEQ ID NO: 4018 - DNA, 157 bp, Homo sapiens
  misc_feature (1)...(157): n = A,T,C or G
tcattcgctctgccacgcccacngctggaacctgaggagccacacactgtgcaccatttctactggaccacnagattattcggcgggaanctgggtcccctcccccttccttcataacttggtgacacaacaataaaatttgagccttgatcaggag

SEQ ID NO: 4019 - DNA, 123 bp, Homo sapiens
  misc_feature (1)...(123): n = A,T,C or G
gggagagatttatatgcnaagtctggaatagtgagaagctggttaacagnngatgcngacgngagcanggttgcttctactggnagtcctgctgcgctgccaaacagtagcagttatcttaga

SEQ ID NO: 4020 - DNA, 227 bp, Homo sapiens
  misc_feature (1)...(227): n = A,T,C or G
agactgagggaggagatgtagtctcccctccccnagcctgaaacctgcttgctcggggtggagcttcctgctcattcgttctaccacgcccactgctggaacctgaggagccacacacgtgcacctttctactggaccagagattattcggcgggaatcgggtcccctcccccttccttcataactggtgtcgcaacaataaaatttgagccttgatcagaaaaaaa

SEQ ID NO: 4021 - DNA, 145 bp, Homo sapiens
  misc_feature (1)...(145): n = A,T,C or G
aaaaagactgaggtccggggcaggngtaagagacttccgtangttcgaggccagcctagtctacatagcgagttccccagttatgttnctctccagccagaaatacatcctgtctcaaacaaataaattgataaaaggaaaaaaa

SEQ ID NO: 4022 - DNA, 226 bp, Homo sapiens
  misc_feature (1)...(226): n = A,T,C or G
agactgagccctgctggctctgntctgtattcatgaagcacccaggtatgtgtgcatgtgctcagttccgacaaactgttggaaaccccaagcagcagngttnctccgtgnagcctggctgtcncggacgttatgcatggagagagcatgccctcannctcagagattcacctgactntgnctcccanataatcagggccaaattattgtttggttgttttgctca

SEQ ID NO: 4023 - DNA, 267 bp, Homo sapiens
  misc_feature (1)...(267): n = A,T,C or G
agactgagggagggancaactgccgagntccaagcagcttactgngccccnnaaaaggagagagtggcngatcaagcgnattgcctgnagaagngtcatgaccagcatggatgagctcctgccacncncancntnaggctccctccacggagggaggagtgtgtncttagagntnatgttaanaaaagaggtgtnnannttcttttgagancntgacttattttcattnttaaatgattataaaatttataaagttaaaaaaaaaaa

SEQ ID NO: 4024 - DNA, 478 bp, Homo sapiens
  misc_feature (1)...(478): n = A,T,C or G
gcagcctgcccaccagggcaacacaaatactaattaccactacttancacaagctgnttcctggttgaacctcattaccgaccanaactcncaacgactgnatgcagnttctcagagctgccaccatntcatctggttcttgncactttcnctgtacagctgggcatcggggacccaggacccactttccacaggtggagacaaggaaccctgactganagggctgaagngctctgagacatggcatcttaagtggcacccagtggagctggagagatggnnccannggntaanannncttgcgggaagatggacggttnaggtnncagcanncannttggtctgggaattctagtggcagaggacctaatacnatcttctgggcttccatgggcaccagnaattcatacggtacacatgcatgtatataagtaaaacacttatgtacatatgcaagantaaacaaatctcccacccc

SEQ ID NO: 4025 - DNA, 341 bp, Homo sapiens
  misc_feature (1)...(341): n = A,T,C or G
atctttggaagcaccagcncngttncactgcctgagaccttgtngtttgtctcgaccctggatggaagcttgcntgctgttagcaagaggacggnctccatcaagtggactttaaaaganganccagntcctgnangncccaacacactgtggaagagccgnctttcntcccaangannnatnttctcatgtctggtacnaactcanccnncctttactaantgaattnttngcacatggggccccttgactgatncgnagnncctggcgcgncntgcccctgcccaaaaacactacggaatcccccctctgngggagagggggttgacctttgtactgaa

SEQ ID NO: 4026 - DNA, 191 bp, Homo sapiens
  misc_feature (1)...(191): n = A,T,C or G
tgaaactgcttgctcggngtggagcttcctgctnattcgntctgccangcccactgttgnaacctgagganccacacacgtgcacctttntactgnacctgagattattcngnggnaatngggtcccctcccccttccttcataactggtgtcacaacaataaaatttgagccttgatcagaaaaaaaaaa

SEQ ID NO: 4027 - DNA, 230 bp, Homo sapiens
ccagactgagggaggagagtagtctcccctcccccagcctgaacctgcttgctcggggtggagcttcctgctcattcgttctgccacgcccactgctggaacctgaggagccacacacgtgcacctttctactggaccagagattattcggcgggaatcgggtcccctcccccttccttcataactggtgtcacaacaataaaatttgagccttgatcagaaaaaaaaaa

SEQ ID NO: 4028 - DNA, 140 bp, Homo sapiens
  misc_feature (1)...(140): n = A,T,C or G
ctccacacgtgcaccatggcatgcgcacacagtattnaaacacatacattcatatatacactaccgaataatnnattgatatnnatncgagaanantgcaaaagnaaaaaggttggtggggctggagcccgttccagata

SEQ ID NO: 4029 - DNA, 228 bp, Homo sapiens
  misc_feature (1)...(228): n = A,T,C or G
gactgagggaggagatgtantctcccctcccccagcctgaaacctgcttgctcggngtggagcttcctgctcattcgttctgccacgcccactgctggaacctgaggagccacacacgtgcacctttctactggaccaganattattcggcgggaatcgggtcccctcccccttccttcataactggtgtcgcaacaataaaatttgagccttgatcagaaaaaaaaa

SEQ ID NO: 4030 - DNA, 236 bp, Homo sapiens
  misc_feature (1)...(236): n = A,T,C or G
ctgagggaggagatgtagtctcccctcccccncctgaaacctgcttgctcggggtggagcttcctgctcattcggtctgccaancccactgctggaacctgaggagccacacacgtgcacctttctactggaccagagattattcggcgggaatcgggtcccctcccccttncttcataactagtgtcgcaacaataaaatttgagccttgatcagaaaaaatttttttaaaaaaa

SEQ ID NO: 4031 - DNA, 297 bp, Homo sapiens
  misc_feature (1)...(297): n = A,T,C or G
ctccggcctccattctccagnnctgggatagcanagaacctgggttngattccaancacccacatgggtnctcagtcatgcctaactccantncaaggggnccactgngctcttcngacctcngtgagngaggaccaagcnctctnagtgcacataaatacangnaggcaacacacnnttgaaataaaatatgataaatcaataantaaaaataaccaattcttacaagttggcctctnnatactcctcacaacacatgccctaaacacacacacactangtgaacagataaataaa

SEQ ID NO: 4032 - DNA, 176 bp, Homo sapiens
  misc_feature (1)...(176): n = A,T,C or G
agactgagggctggtgagatggctcantgggtaagancacctgactgctcttccgaaggnccggagttcaaatcccagcaaccacatggnggntcacaaccatctgtaacgagatctgactccctcttctggagtgtctgaagacagctacagtgtacttacatataatcaataaa

SEQ ID NO: 4033 - DNA, 514 bp, Homo sapiens
  misc_feature (1)...(514): n = A,T,C or G
gactgagagaatacattcctggtcagcgtgatggaagaggctcaggccaatgactcttttcaacttgaacttgaagatttcattanaaagcagaaagccagaggattacatccaaatgtctgcttcagaaagatggcagcggattccgttcaccagaagagagacagtggcagccctggagccatgcgggggctaccattctggctcagaaacgacttcagatcctctccttcctataaaaggctgacagtggaaaaccaggtaccttactgcagacaaagactggaatctctaaaacacagtctgaaaaaccagccaatcagtcaagacagaaaggagaggacaaggctccagggggaaggagaagccaccacttgggagccagggatgcccaaggggaaactctacagagtgaggggttcacgcacggaagacagcctcagcagaaggaaggtctcagcagagccagtggctacacagaagtctaagcacagaaaggagaaccaccatgatg

SEQ ID NO: 4034 - DNA, 102 bp, Homo sapiens
  misc_feature (1)...(102): n = A,T,C or G
gtaccagcaccgatccagttgtgnatntctncatcatactccttggcacgcnnggagatcatggtgcnttgcnttttaaagatgtatttatattttaatttt

SEQ ID NO: 4035 - DNA, 233 bp, Homo sapiens
  misc_feature (1)...(233): n = A,T,C or G
cccagactgagggaggagagtantctcccctnccctagcctgaaacctgcttgctcgggggggagctttctgctnattcgntctgccaancccactgctggaacctgaggagccacacacgtgcacctttctactggacccgagattattcggcgggaatcgggtcccctcccccttccttcataactagngtcgcaacaataaaatttgagccttgatcagagaaaaaaaaa

SEQ ID NO: 4036 - DNA, 228 bp, Homo sapiens
actgagggaggagatgtagtctcccctcccccagcctgaaacctgcttgctcggggtggagcttcctgctcattcgttctgccacgcccactgctggaacctgaggagccacacacgtgcacctttctactggaccagagattattcggcgggaatcgggtcccctcccccttccttcataactggtgtcgcaacaataaaatttgagccttgatcagaaaaaaaaaa

SEQ ID NO: 4037 - DNA, 232 bp, Homo sapiens
gactgagggaggagatgtagtctcccctcccccagcctgaaacctgcttgctcggggtggagcttcctgctcattcgttctaccacgcccactgctggaacctgaggagccacacacgtgcacctttctactggaccagagattattcggcgggaatcgggtcccctcccccttccttcataactagtgtcgcaacaataaaatttgagccttgatcagagtaaaaaaaaaa

SEQ ID NO: 4038 - DNA, 221 bp, Homo sapiens
gactgagggaggagagtagtctcccctcccccagcctgaaacctgcttgctcggggtggagcttcctgctcattcgttctgccacgcccactgctggaacctgaggagccacacacgtgcacctttctactggaccagagattattcggcgggaatcgggtcccctcccccttccttcataactggtgtcgcaacaataaaatttgagctttgatcagtat

SEQ ID NO: 4039 - DNA, 220 bp, Homo sapiens
  misc_feature (1)...(220): n = A,T,C or G
tgagactaagaaacacccaaatctaaacanaagaaacctcccgggctgnngagatggctcagtggnttagagcacccgactgctcttccgatggtccacagttcanatcccagcagccacatggnggntcacaaccatncgtgacaagatctgactccctcttctgnagtgtctgaanacagctacagtntacttacatataatgaataaataagtcttt

SEQ ID NO: 4040 - DNA, 471 bp, Homo sapiens
  misc_feature (1)...(471): n = A,T,C or G
ccagtgtcctgcttaagcaccgagganagaggangctggngaccaatagtatcnanggcatgcntctcangggagtanggcnaagnctgntctgctgaagaatactgctaagatctctggaaacaagagggcaccgctcataagtcacagccctgtgttctactaggaactgccncggggtagagcaggccactggaggggacctcagcactgacgctgcacagccagccagtcagaggctctctgagaccactggaccgtggtgggcagggtccgggcactcacctcctctgtcatgccagcacggatgagcgtgaagaggnacttcancagtctgacctcgtcctctctgtccagatcntcgagtggcaacttctgtctaatgggagcggtctgggtcctgtgaaaaacagcccccactatcgatacatatttcanaatntacagaccctggaatgctaaaaaaaaaaa

SEQ ID NO: 4041 - DNA, 239 bp, Homo sapiens
gactgaggtgcctggctgaggacgtcctccccagggagccggtgtgccgaggagggaggacctgggttcagttcccagcatccatatggcagctcccaaccatcggtaactccagttccaggaatccagtgccttcttgtgacctctgtgggcatcaggacacacataccagcaaaatactcatgcacataaaataaaaagagataaatattaaaaaagacatcatttagcataaaaaa

SEQ ID NO: 4042 - DNA, 369 bp, Homo sapiens
  misc_feature (1)...(369): n = A,T,C or G
actgagtcctgcactggagaacctgttgactgactgagctggcttggtcagaggatggatgctgtaagaatggcgaaatctagnggatgctcacagtcagctaatggatggatcatagggctcccaatggaggagctagagaaagtagccaaggagctaaagggatctgcaaccctataggtggaacaacattatgagctaaccagtaccccggagctcttgactctagctgcatatatatcaaaagatggcctagtcggccatcactggaaagagaggcccattggacttgcaaactttatatgccccagtacaggggaataccagggccaaaaagggggagtgggtgggcagggagtgggggggtgg

SEQ ID NO: 4043 - DNA, 229 bp, Homo sapiens
  misc_feature (1)...(229): n = A,T,C or G
gactgagggaggagatgtantctcccctncccnagcctgaaacctgcttgctcggggnggagcttcctgctcattcgntntgccacgcccactgctggaacctgaggagccacacacgtgcacctttctactggaccagagattattcggcgggaatcgggtcccctcccccttccttcataactagtgtcgcaacaataaaatttgagccttgatcagaaaaaaaaaa

SEQ ID NO: 4044 - DNA, 418 bp, Homo sapiens
  misc_feature (1)...(418): n = A,T,C or G
gactgaggtggggtctttccaccaccatggcangagatggagaaggngaacctgtcctagagatggncgcgtgantgaagcnacccttggacaactgnctaacacacacccaccatggttgcagactccagngatgcactttaacatcggacttaactggatgaaatcatagaatgacacatatccgcccggtatattgcctattttccctaaatggtgtagctgcctgcagactgaccctgggggactcccttcttcctctccagtgaactggaccaacgcctgcctgaacgcacacccgctatagttttgactgcgtattttattttcattgngtttttatgagttgtttggtttgaagtagggtcttacacttcttaaggngactctagacgaagntctggaattataggcatgc

SEQ ID NO: 4045 - DNA, 204 bp, Homo sapiens
  misc_feature (1)...(204): n = A,T,C or G
ctcccctcccccagcctgaacctgcttgctcggggtggagcttcctgctcattcgntctaccaagcccactgctggaacctgaggagccacacacgtgcacctttctactggaccagagattattcggcgggaatcgggtcccctcccccttccttcataactagtgtcgcaacaataaaatttgagccttgatcagaaaaaaa

SEQ ID NO: 4046 - DNA, 252 bp, Homo sapiens
  misc_feature (1)...(252): n = A,T,C or G
tgctctgggacaagtgccattntacaagactgaagtattcaggaattaataacctgtccatggacaggatgcttctactanggttcaaagaactgatccacagtgntgagcatttactgaagattcaagnactggagctgtgtttatctttggaacanaatcatganagtgttctgcagaaacttgagtcatttccacattttgtctacatgtcctcatattaaatcctccctgtgctctgaaaaaaaaaaa

SEQ ID NO: 4047 - DNA, 259 bp, Homo sapiens
  misc_feature (1)...(259): n = A,T,C or G
cgtttactaaatgaatgcctgcgggagtctgactgtgccacgtggagcntgagaacacacccggagaatagctggatagaagggtggagcgctgggccatcctcctctagctcacgcccggtgccaccacgcagctcttacctgggacacaggtagtcgccagcaacagcagcagcagcagccgccttntttngtcccatgggnnnttccttcacctctgctctagactgaccgaggggaagaagacagttttgcgata

SEQ ID NO: 4048 - DNA, 348 bp, Homo sapiens
  misc_feature (1)...(348): n = A,T,C or G
gactgagtttatggannttggagctctgcctgtgtatatgtactgggngangggggtcantatcccctggnanctgatgtttcagacagnnagagagcttgccacntgggtnctagaaattgatccgnattcctttggaagagcagncatgttctcttaaccactganccatttctccanccnttttaaatnanatgttattgcatanatatntattccnttaaaatcatgtancctgcaacaacatccanatatnacagtacnattcntgggaaaatgagtngcanaggcgaagaaaattgntagattgnnanccnagctccntctgctggatttccaggggaagca

SEQ ID NO: 4049 - DNA, 390 bp, Homo sapiens
  misc_feature (1)...(390): n = A,T,C or G
gactgagacctccttttntggctgctctgtcccaaatatgcgccacananagagagaaaggaagagctggtanatcaatctccanaagtaattaaaagccggataaaagaaaccattccacagttcatgatggagaccttgaaaactagcagtcaagaatgnacttggttctgtnctanccacaggccntaaacactaataaccnttnacgggcactggtgtnctctatttctgngncaccntttttctangttcncacngancttantgancncanctngnctgnctnctctgtggcatccnntgcttntttgaggcttgaangggggccnnacttnccgtcctagctgccaggatgggaaggtgtnancagaacaccttgcgggtggg

SEQ ID NO: 4050 - DNA, 182 bp, Homo sapiens
  misc_feature (1)...(182): n = A,T,C or G
gactgagggaggagcatgtagtctgccctacnncattctgaaacctgnttgctcggtgnggagctnactgctcattcgttctgccanncccantgatggaacctgaggaaccacacncgtgnanctttctactggaccaganattattcggcggnaatacgngtcccctcccccttccttct

SEQ ID NO: 4051 - DNA, 183 bp, Homo sapiens
  misc_feature (1)...(183): n = A,T,C or G
ggcttccacaggcttgactcaccggaagcagtgcgccatcctcgcagcaagacataagangcaggnngaacagctgnattgatacnttaactgctgggtcagctaaagttaagagctaacctctagggctggagagatggctcagtgggtaagagcagnngggnactcttacccactgacttg

SEQ ID NO: 4052 - DNA, 338 bp, Homo sapiens
  misc_feature (1)...(338): n = A,T,C or G
attcgatttggcaatatgctgaanatgnagtggcatatcaggagaggtgagaatgattctaatgagataattggcctatgactcatggcctatgataacaagatgtgaaggaatgcaaaggagtgatcttcagagagccagaaagtaatggtagaaagaaggtctgggaaagaagaaagatgcttgctgaaggacaatgactgagtcagcaagaaggatacaccattggaatttagacatcagaattggatgaaaagaacccatgatgttgctgtgggcaagagttttgtagtaatgaaaaagaataagagcttttcttacagaaggcaaaaaaaaaa

SEQ ID NO: 4053 - DNA, 271 bp, Homo sapiens
  misc_feature (1)...(271): n = A,T,C or G
tatactgagacctggnntaggagggggagccaccacccgnagcagacttttgcacttctcaatagccctctggaccaggtttagttattaacttcgtcaaacacatggaaacagctccgcgaggacattgttagtggaccgcgagtcatgggagngcttaacagntcgagtgaccttggncgaatcccttgttttgacgntcctctacttatgcgatggactancctnttttnacnntccctgtactattttggtgccccctgatgtttta

SEQ ID NO: 4054 - DNA, 141 bp, Homo sapiens
  misc_feature (1)...(141): n = A,T,C or G
ctgctgcgaggaaccagggaagcctaccgagctgnaggttgactgnatacgagttancaggancagacatgaatgcatagcatacgntgntcangnaaactcnacttgcctnctcttatntcatagacctactaatgattt

SEQ ID NO: 4055 - DNA, 508 bp, Homo sapiens
  misc_feature (1)...(508): n = A,T,C or G
gactgaggctgacacaaggtaaggagncttacggtgctgatgggcaaagaagccttcaaagatgacaaagttgttcacctggaagatgaagcaaacagagcatactgtctcttctcatcacacagtgggtatagaacctggaccacaaagcccatgaggtgcgtctcggtgtggctaagctaatgaaatgcttgcctaccatgcatggagcgctggggtcaagcctnanttnccacacacaactgggtacagcgacatacgcccgaaatcccaacacttggaggggaaaggtaggaggatgagttcaaggacatccccagctacacagagagccagaggccagctgggctacatgagaccctgccccaaggttaaaacatggggctggagagatgcttcagtggttcagaaccaatgctgctctcgcagaagactctgatttaactccaaatactcacaagatggcttatgattgaccccctgtnaccccnntcccagaggatccaac

SEQ ID NO: 4056 - DNA, 217 bp, Homo sapiens
ccttccactcacagagcagaagggacccctgtgcaaagtggagcctggaagctatcctctcctcctcctcccctgggatcccagatcgatgcccagacggtgtctctacaaccctggctgtcctggaactcactctgtagatgaggctggcctcgaattcacaggagatccccttgcctctgtctcccaagtgttgggattgaaggtgagggccccc

SEQ ID NO: 4057 - DNA, 170 bp, Homo sapiens
  misc_feature (1)...(170): n = A,T,C or G
gactgagcttcttcccttcttctcataatcatcgncatcgtcctcgatagcctntccagngaannacagnactgatcttgnnattatgcgctcacgtanaaagngaccantntcanagtctgcanccagtntcgcctcagcgatcatcatccanatcgccattctcagga

SEQ ID NO: 4058 - DNA, 160 bp, Homo sapiens
  misc_feature (1)...(160): n = A,T,C or G
tcattcgttctaccacgcccactgctggaacctgaggagccacacacgtgcaccttnctactggaccagagattattcggcgggaatcgggtcccctcccccttccttcataactagtgtcggcaacaataaaatttgagccttgatcagaaaaaaaaaa

SEQ ID NO: 4059 - DNA, 265 bp, Homo sapiens
actgagggtccagcctgtgacagcccatccaggctcggacgctggattaacacctgtgacatcacgtgtgcgctcccgctacatctgtagtcacatctacagccaccttggcagaggaatctacactgagttctgaacctaggtgaccacaagttctcaaacctcatctgtgaccctcaacaccctaatacctgggtcacacttgtgaaactgaaattcctacctgttaccaacacttgtaacgtttaaaacacataaaaaaaaa

SEQ ID NO: 4060 - DNA, 150 bp, Homo sapiens
gactgagaggtcccgaacttgattccagcaccacattggaggggtcataagcactccagctccaagggatctgacagcttcttttacgcatgcattggtgtgaaatttttttatttatttaataaatagcaattatttaacaaaaaaaaa

SEQ ID NO: 4061 - DNA, 101 bp, Homo sapiens
  misc_feature (1)...(101): n = A,T,C or G
aagacaactacagtgtactcanatncataaaataaataaatagntattttnncantggagatnaaaaatgcaagccctgnggacctggggacatactgtca

SEQ ID NO: 4062 - DNA, 133 bp, Homo sapiens
  misc_feature (1)...(133): n = A,T,C or G
gactgagagcccttggtgctaccacttctgagcatctggntgtctctgcagtgttggggtactactagtgtgtctgaagacagctacagtgtactcatatcaaatatataaatatttaggggaaaaaaaaaaa

SEQ ID NO: 4063 - DNA, 368 bp, Homo sapiens
  misc_feature (1)...(368): n = A,T,C or G
actgagctgccgaggagcactgttgctgtatgcctgcggagccacccaccaagtccattgtgcatgaactccagctaccagcaaataaaatcccctagcttatcaaagaagttccttgtgctcctcatcagccaagattttgttgcctggttttagaggatatttgtgaaagaaatttttgctcactatggctgggacatcaagaaaagagctccctaactcaagganggtattactacttggtactgaaacaccttcactttgggctgcaactccttttcagctgccactgtctttgtttctcctcttgatacaaaatacaatgggtgagattaaacgactctagatcttctactctgcaaaaaaaa

SEQ ID NO: 4064 - DNA, 220 bp, Homo sapiens
  misc_feature (1)...(220): n = A,T,C or G
gactgagggaggagangtagtctcccctccnccagnctgaaacctgcttgctcggggtggagcttcctgctcattcgntctnccacgcccactgctggaacctgaggagccacacacgngcacctttctactggaccagagattattcggaggnaatcgggtcccctcccccttccttcataactagagtcgcancaataaaatttgagccttgatcaga

SEQ ID NO: 4065 - DNA, 195 bp, Homo sapiens
  misc_feature (1)...(195): n = A,T,C or G
gactgagggctggagagaggctnagcggctagnagcactgatngctctnccnaagggcctgagtntcaatnnccagcacccacatantggctnacaaccatctgtaatgggatntgatgccctcttngggtgtgnctgaagacagctacagagtactcatatacataaaatanataaagaaatctttaagcaata

SEQ ID NO: 4066 - DNA, 127 bp, Homo sapiens
ttcattcccagcaccacatggtgattcacaaccatctgtaataggatctgatgccctcttctggtgtctgaagacagctacagtgtattcacatacatataaattaaataaatcttaaaaaaaaaaa

SEQ ID NO: 4067 - DNA, 223 bp, Homo sapiens
  misc_feature (1)...(223): n = A,T,C or G
agactgaggcctgcattatttgctgttgtttatggtaagcctgaaagtnctttgaaatggctatgggagaaagctgcagaaagcttaagactctgcctcatggaagaccttctgactgcctccatttaccacctgtggtattaaagacttacttagcgacaccagggagatgaatttcccatccacacgtgcagtaaaatttggtttatcagataaaaaaaaa

SEQ ID NO: 4068 - DNA, 235 bp, Homo sapiens
  misc_feature (1)...(235): n = A,T,C or G
gactgagggaggagatgtagtctcccctcccccagcctgaaacctgcttgctcggggnggagcttcctgctcattcgttctaccacgcccactgctggaacctgaggagccacacacgtgcacctttctactggaccagagattattcggcgggaatcgggtcccctcccccttccttcataactagngtcgcaacaataaaatttgagccttgatcagagtaaaaaaattaaaa

SEQ ID NO: 4069 - DNA, 157 bp, Homo sapiens
  misc_feature (1)...(157): n = A,T,C or G
accatcggatcccattacagatggctgngagncatncntgcaaccaaccatgtggttgctgggaattgaactcaggacctgtggangagcantntgtgctcttaccctctganccatctctccagcccaagctgaaggcttctatctaaaaaaaaaa

SEQ ID NO: 4070 - DNA, 313 bp, Homo sapiens
  misc_feature (1)...(313): n = A,T,C or G
ggagaacatgtcgtaagatgtggnattgcnncgtggcnctcancgctncacngacaacgagntagtctccanaangatctgtgtnatctntgccattgaaccctntccctcttgttgccagatcaccaggngnntctcattcanatcttnnnattacattcatctacacactggtccttctacagtttccaaacattanctnaaatttcccttctttggaaagactctctgaaaaaggaatatctgtctatctccttctaggagatatactttgtaattatagaataaagatttgtatgcttaaaaaaaaaaa

SEQ ID NO: 4071 - DNA, 204 bp, Homo sapiens
  misc_feature (1)...(204): n = A,T,C or G
aagcagatgatggatatctggggttnggccttgaaatcatacctgttctctggcatccagtctcctnagctaacccagcctttaaagaggaatatgttaacaagctcatctgaatttctctacacatccatcaataaaagctctaatgaggggggcatattactcctctggttgttgccatgcaaaataaaaagagtctacttt

SEQ ID NO: 4072 - DNA, 174 bp, Homo sapiens
  misc_feature (1)...(174): n = A,T,C or G
ttttttttttttaccttcccggcacctggcctaccctcngtctgtctgncctggcactgnngtngcccccctcatccagnnntgntgnggaggaggnacangnggacacggncttggccacattacacactgncagaaagcccaccccaggngccagtcgatgacagggaccag

SEQ ID NO: 4073 - DNA, 152 bp, Homo sapiens
  misc_feature (1)...(152): n = A,T,C or G
cggacagcggtggcgcatgcctttantcccagcacttgngaggcagatgaggcggatttctgagttcgaggccagcctggtctacanagtgagttccaggacagccagggctatacaganaaaccctgtctcataaaacataaaaacaaaaa

SEQ ID NO: 4074 - DNA, 265 bp, Homo sapiens
  misc_feature (1)...(265): n = A,T,C or G
gactgaggaccactagactgggncagactctcctgtttcctcacagacctgcttaatcaaaagttgtgtcttgggctggagggatggctcagtggttaanaacactgattgctcttccagaggtcctgagttcaattcccagcaaccacatggtggctcacaaccatctgtaatgggatctgatgccctcttctggtgtgtctgaagatagctacagtgtactcatatacataaagtaagtaaataaatcttttaaaaaaaaaaa

SEQ ID NO: 4075 - DNA, 107 bp, Homo sapiens
  misc_feature (1)...(107): n = A,T,C or G
aatacagacatacacanatcagagaaaatcaacttacgtcctcaaaggtcaaagaccaactactgntttcaacccataggttacaaagacacttgaaaaaaaaataa

SEQ ID NO: 4076 - DNA, 113 bp, Homo sapiens
agaagaggacatcagtaccctcaggagctggagttacagaggctggacactgactcagggcctctggcagagcttcatgtgctcttaaaagagtcagttctccaggcctaagt

SEQ ID NO: 4077 - DNA, 403 bp, Homo sapiens
  misc_feature (1)...(403): n = A,T,C or G
cctagctctagtcagtgngactaccgccaacngccntgactaccnagagggcacactnntntaaccntgacctgaaggncaggctcatanncttctcttcctgagtagccanntcaagatgnnccaggaaganganaagcttttatacacatgngtgccangctctggtttgcagaanacttcgcagantggaaggaataaaaaanctccagcagaggctggagagatggctcagtggttaagagtgccgactgctcttccagaggtccccagttcaaatcccagcaaccacatggtggctcacaaccatctgtaatgaaatctgattccctcttctggagtgtctgaagatagctatagtgcacttacatgtaataaataaatgaatctctaaaaaaaaaaa

SEQ ID NO: 4078 - DNA, 172 bp, Homo sapiens
  misc_feature (1)...(172): n = A,T,C or G
atgtcgtctcccctcccccagcctgaggcctgcttgctcggnggggagcttcctgctcattcgttctaccacgcccactgctggaacctgaggagccacacacnngcacctttctactggaccancagantnttcggngggaatcgggtcccctcccccttccttcataact

SEQ ID NO: 4079 - DNA, 169 bp, Homo sapiens
  misc_feature (1)...(169): n = A,T,C or G
ctgcagactgctttacatgatttggcnaagngngtagcatctncaantgntgnctgcangnctgccaggtgcacccanaannntgntttntccatcataacaccaccttcactggccttctagaacactggatgatgttatataatgcaaagctgatatttaaaaaaaa

SEQ ID NO: 4080 - DNA, 206 bp, Homo sapiens
  misc_feature (1)...(206): n = A,T,C or G
ttttagactgaggttcccagnntgccctttganataaaatgggaggccacaaccaaagtcttttggataaagcaccacaatggacaatgtaaggaaggcanccaaacgcttacgcttcccaaggcacagatctttcccagcatgggaaagatcctccctccccctccctccctccttccaccatacactcaataaaataaaataaa

SEQ ID NO: 4081 - DNA, 393 bp, Homo sapiens
  misc_feature (1)...(393): n = A,T,C or G
tagggtgacaggagctancaagngagcnaggcnnccgcagagagaaaggantgactggagccgggcttctgagttcgcttctggcctcagntcttagcantgaacnacctttaccaaatcggagtcacccctgcttctgccagtaccacagttatgcccacagccaacagttctctaanagactctgaccaggctgagaactcacccatccttcctccaaagacatctgggaagagctaccttgaaagctggctgtggtggctcaggcctagaatcctggcagttgggaggctgaagcaggaggaatagagctcagggccagcctgggctacatgagtgtctgtcccaaaaaccaacaaggaaatttcttnttttaagatgtaaaaaaaaaaa

SEQ ID NO: 4082 - DNA, 121 bp, Homo sapiens
  misc_feature (1)...(121): n = A,T,C or G
ttggtgctaccacttctgagcatctgggtgnctntgctgtgttggggtactactagtgtgtctgaagacagctacagtgtactcatatcaaatatataaatatttaggggaaaaaaaaaaa

SEQ ID NO: 4083 - DNA, 116 bp, Homo sapiens
  misc_feature (1)...(116): n = A,T,C or G
atgccattacagccgcatggcatacctcatactcagaggagccagantgngcaaatcatgggtggcatganctctctccctatagacaatacacattatgtatgataaaaaaaaaa

SEQ ID NO: 4084 - DNA, 161 bp, Homo sapiens
  misc_feature (1)...(161): n = A,T,C or G
actgaggacgcttctgcttcctcctggcctcctctcctggatggtaaactgtgaagtttctccaagcttcaccctggaaactgaggtctttctccaaganggtattcattcacatggcttaatgtaattatagaaaaaggcccatcactgatcttgcctta

SEQ ID NO: 4085 - DNA, 248 bp, Homo sapiens
  misc_feature (1)...(248): n = A,T,C or G
gtgccttgaaaaaaactgaagacactgggctgagcagaatggagtaacgaactgaggttngagaggctgcgttcctcagtggncantgaatgcntncggcattgagacaccagcgtgngaagatggtatgctggtgaatgctgttgttcaggggtgagccatggcntacctttctgcattgnacctgcatgtttgagttttaaactaacacatcttnttagcatcttctggaaacttaaaaaaaaaaa

SEQ ID NO: 4086 - DNA, 182 bp, Homo sapiens
  misc_feature (1)...(182): n = A,T,C or G
tttgagtacccttgtnagagctttctgttcagnangaggccnnagnggnggannnngagganccacacacgtgcacctttctactggaccagagattattcggcgggaatcgggtcccctcccccttccttcataactngtgtcgcaacaataaaatttgagccttgatcagaaaaaaaaaa

SEQ ID NO: 4087 - DNA, 135 bp, Homo sapiens
tatactgaggtcctgagttcaattcccagcaccacatggtgattcacaaccatctgtaataggatctgatgccctcttctggtgtctgaagacagctacagtgtattcacatacatataaattaaataaatctta

SEQ ID NO: 4088 - DNA, 548 bp, Homo sapiens
  misc_feature (1)...(548): n = A,T,C or G
gactgagatccactggaacgtaaaagcactaggtaganggctaagatattggagaacaacttttcaatttgaagccctgtttataaacttctggaatatgaagaatgcaaggtgcctggatgggtgtaaaagngaaanggaaactgggaaaggtgtgtctgtaggaaacctgaggcagntaaaatagaanaagagtggcctgacntgagacttcagctcantggtatagcacatggcgagtatgcatgaagccctggcttcgattcctgattctaaagaccaaaatancancaaaagagtgaagaatattttcatctatctntgagcaagaacttaacggtgtgtgatantaggctgacnggagangagacaacaatggtagaactccnnagaaggactgaacaactgcctcgtgggctggccataaggaaagccacgcgtgaacttcaaggaaaggaagaggaggcactgcagagaagaagaccccaaagctcctgcctagcccagaactgcaagctctcccctcagagcgaaggaggaggacggct

SEQ ID NO: 4089 - DNA, 129 bp, Homo sapiens
  misc_feature (1)...(129): n = A,T,C or G
aacctgaggagccacacacagtgcacctttctactggaccagagattattcggcgggaatcggggtcccctcccccttccttcataactggtgtcncaacaataaaatttgagccttgatcagagaaaa

SEQ ID NO: 4090 - DNA, 136 bp, Homo sapiens
  misc_feature (1)...(136): n = A,T,C or G
cacggccagctcacctgtnctnccaggaactcaggagtgagcaggcncacagaactactctnctgcccgcttnaagtnccaggcaagcaagagcctgtgngggaagagacnacgtcccagaaggaagcaaaccaga

SEQ ID NO: 4091 - DNA, 535 bp, Homo sapiens
  misc_feature (1)...(535): n = A,T,C or G
gactgagaatagaaaccctgactaaggaacacggctacagagagaagccctgtcctggggagacggctcaatgggacaatgtgtacaggttcaaggnccaaggatagtgagagccaaggctgccaaagtcttatttcctgtctgtcagaaacactgaagagctttgcagtccctcccagggtgcaggcnggtcagtgcaagactattcagtctccagagaggaccgttgctcaaatatcgtaccccacatacaaaattatggtctactgtcccagagaacaccagcaagtattgacgacttctctggtttgccagagactctttcctcgactttgccgatggcatctgggatggttgacgtcagctgtcaacttggcaggatcaggaatcctctggaaagggagtcttgaagacagatcgtccanatcatgctggcctgtgggcacggctgtggggcttgtcttgattgggttagttacgtgaggtggtgtttcagcgtctgggcactgnatggaggagactgagctcagcgcaa

SEQ ID NO: 4092 - DNA, 361 bp, Homo sapiens
  misc_feature (1)...(361): n = A,T,C or G
actgagaccagttgtctgccttcctctgtganagcacannccaatgccaggcagcttcncgagcgancngnagaggccaggcntgacagaagatgagcagntctcaaccatgcctctccttgtngtgacatgaactctacacctgccttccctggtcaacatgtcacatgagcaaagtggcagacaaagacctggggactgggctcccagggcgtggagttctgcanaccaagccacagagccagagccgagccgcactcccctgcttggtgtcacaagagcctcttcccactggcagagaagggtggggagggtccaaaccgagaagaatgtatattaaagagcagcctggaacacaaaa

SEQ ID NO: 4093 - DNA, 291 bp, Homo sapiens
  misc_feature (1)...(291): n = A,T,C or G
actgagagctccggcccatgtgnctttgctgcccttggaggccagaagaggacactggatcccagtaatctgcagttacagggaacacaatctcaatttaaaaatgtctccagagctggcaagatggctcactcgggtaggagcacttggcgtcccagcaaccacatggtggctcacaaccagccgtggtgagatctgatgccctcttctggcatgtctgaacacnttttncagtgntcttatgtataataataaataaatcttttaaagaaatctttaaagaaatcttta

SEQ ID NO: 4094 - DNA, 212 bp, Homo sapiens
  misc_feature (1)...(212): n = A,T,C or G
gtctacgaagttgcattggaacncatacacactgtcagcgtngggcagcntttgaactgtggacctttctggcggagccttctgagtctggattataggtatgtatcgncagcggaaataccngcnttattttatactcacttcagagagtagctttacctgtcatttcttatattactttacttctaccatcaaataaacttaccttcatc

SEQ ID NO: 4095 - DNA, 442 bp, Homo sapiens
  misc_feature (1)...(442): n = A,T,C or G
cttattatatcacaagnacactgtaagctatcttcagatggcccntnccncctatgagatacanctgcttnctnnngncctcagncnntgnnaaatnacttcatcatactctttccgccnagtgctttgnaaagactgnangacaggaaatggaaatgagggcagtgaccatttgagctgcaagatctggatctggaggcggtgagaancacagctcggtntgnaactggggggggttcctcaaaacgagagcctgangngcaggttttacctaccaaagcanacctgccttccaggttctnccgggnatcccacagtccctacctggggnaaccctggcccccaaccctgaacttttncaggccctaaccttgtccctttccttggncggggaacttcccaacttnaaagagcnagctgccccaataaacctgcctttaat

SEQ ID NO: 4096 - DNA, 288 bp, Homo sapiens
  misc_feature (1)...(288): n = A,T,C or G
ctcgggctgacgggtagcctgaccangggcnatacntncttgttgtggcacnnnngtatgacccgaaagacnncagaacacttganagagtgttcaccaccaagcagggancnccaggagtgngccccctangaaggagatgaagtacacccaggaatacggaatcatgaataggcaaaggcagactttcactgccttcgtcttggangcagcaacggtcttttcacanngggggccgtgcgtgaanccaggcnnatcgcggctggcatanccattcagaaaaaaaaa

SEQ ID NO: 4097 - DNA, 135 bp, Homo sapiens
  misc_feature (1)...(135): n = A,T,C or G
cggaatctttttgtcaagaccntcctgtccngcaccctgaatgaacttttttnacgagggggngccgnctatcgnggctggccacnacgggnagttcnttgcncanctgagctcaaccgttcgtcacccgaaccg

SEQ ID NO: 4098 - DNA, 136 bp, Homo sapiens
  misc_feature (1)...(136): n = A,T,C or G
tttctgaggtactcatccctttgcactttntggatggtnaggaagcncttttcctgatagaagatgatgatcttntntaaagatcatggaganggggatcgaatactggagaaggactgccttccagatcatctca

SEQ ID NO: 4099 - DNA, 310 bp, Homo sapiens
  misc_feature (1)...(310): n = A,T,C or G
gactgagagatgaaattggcctgatcccatgccctgaagcaagatataaccggagtcccattgtcctggttgagaacaaacttggtgtggagagctggtgtgtcaagttcttattaccatatgtccacaacaagctcnttttgaacaagaacganaaancaatggctnancncagatgaactggctgacgtcacctgcaccctgctgcttctcaacccagacttcaccactgcatggaatgtcaggaaggatgtttccttcaggggcantatgacgnctgtccagatttctgaaaacgtaaaaccctgcg

SEQ ID NO: 4100 - DNA, 102 bp, Homo sapiens
  misc_feature (1)...(102): n = A,T,C or G
gaagggaagagcacccanatttccacagtaccngggcagaagctggcctggacagcaggaaggacgagtggtcnggagtgacccagcctcgcatagtggctg

SEQ ID NO: 4101 - DNA, 250 bp, Homo sapiens
  misc_feature (1)...(250): n = A,T,C or G
catatatgtactgcgctgccatcgatactnttgatgctcagtgngacnancaaannntatnttngatgacctntgnctcgnnttttggngaagnnaggagctgtttgtttctgcccagcatcataaagtctaaanagtcggcctctgnacagctgagacacagcctgctgctattaactgtttttggaaaaggagctatgtaaccatgggtcctctttcagccacctgtaaccttaaagtaatatcaaag

SEQ ID NO: 4102 - DNA, 320 bp, Homo sapiens
  misc_feature (1)...(320): n = A,T,C or G
ggcgccatcatggtcacnnagttgtgcgtgtgcagaccatcaagctggctagggtaaccaaagtgctgggcaggaccggttcgnaaggacagtgcncgcaggtgggagtaggaatctatgaatgacaccagccgttctttcatntgaaatgtcaaacggacccgttcgaaagggtgatgtgctcaacctattggaatcagaaagagaagaggttgcgctgacctttctgcgagggttttggatatccactacttagcccacggaatgacctgnaaatgttaaataaagnatttgtatttaaaaaataaggatacttaaaa

SEQ ID NO: 4103 - DNA, 146 bp, Homo sapiens
  misc_feature (1)...(146): n = A,T,C or G
gacatggcatctgccagctacanncgggcaggagtggccctgccttttganaagtcccagctgnccnngacagtggnngtcagcatagccnanggagcacagccagccacgcccaaantnaactacanctgggaggatggaagccg

SEQ ID NO: 4104 - DNA, 120 bp, Homo sapiens
  misc_feature (1)...(120): n = A,T,C or G
tgaggaacgacatagaaganttaaagcccgtactcagggacnncccacagctgcacgcggaagtgaanntctgggngagggaaaagaaggnccangagattttaatgcaaggtacttatc

SEQ ID NO: 4105 - DNA, 205 bp, Homo sapiens
  misc_feature (1)...(205): n = A,T,C or G
agctcacagagatctgctcacctctgctgggacagnncagaaacaagccttccgtgnatggngaccctcctgcngaggagaaggcatgaaggacggntgactgcctctgaaagtttgnccggacttcctgactaggccanacanntcangccagacagtcccttggaatctgaagggcatgngtttagtttaaaaaaaaaggggg

SEQ ID NO: 4106 - DNA, 260 bp, Homo sapiens
  misc_feature (1)...(260): n = A,T,C or G
agtgactaggcttacattgnnacaagcattggnacacctgcgaccngannagcagangtttctccccnnancctctnaangngctaganggactgcagaccacttacttttgaaccgtnttgcttgcagaannntaaataacnnntnataagcttgggttgtgaaattctcagaggcaagctcatcaccagatgtggcccacagagagaagagccccagcctggctctgagtccacatgcaaggaagggcgaccatgccc

SEQ ID NO: 4107 - DNA, 159 bp, Homo sapiens
  misc_feature (1)...(159): n = A,T,C or G
gaactgagatgtgtaccctgaacaagnaggaaattgaaatggcatcattaaaaagtttgtagaagactggcttcctaaaattctctggagaagtgaatcctgtagccacacaaatttgtaaattactaaagttcttcaataaagaaataatataattaa

SEQ ID NO: 4108 - DNA, 294 bp, Homo sapiens
  misc_feature (1)...(294): n = A,T,C or G
tggcctctggagctcttacctcatgctncaggattactttgaatggcangnggaagcccccnaaccgtaacannggcttcctgangattntcatccgtgaactggntgctcttctctttgctttgaccaaantccttacgagaagcaccctgtagaaagaagggtacctggtttatattttangaagggatacagttttttgtagcaggcaaggcatggaggtggggatagatgaggattgttnacagaggatccanagtcnggcagtatcnggaanntgattgctggtgtaca

SEQ ID NO: 4109 - DNA, 540 bp, Homo sapiens
  misc_feature (1)...(540): n = A,T,C or G
taactgagatgtcgaacacgtctcaggttctcccagnccaaagaatttcaagaaaattcattttatcaagaatatgctgacagcactgataccaagaacggcagaatagcccttatcagtggcnnnagatccttctgtagtatattttccgtgctgccgtttcnagacagtacccaagtnggatatctcagggaaatacaagcttggnaggngctctggngctgnagacngcatntgtccaagcatggcgnccctgatgctgngaaggcctgcctcttatgccanctgnggatnngactgtnctgcctatggcacagaangnanntatcggtagagcttctacatcttanactgagcaaattgaagnctanncacttctccncngttnaggagncaaggnaagcnccccagtnagnttnctctgtaaggccttcaaggggtaaccancctgnggtctgtagagantntacattttcccnaaagncctggagaaaactcttnagcgtganaccagatactgccacttcaagaggcctgggg

SEQ ID NO: 4110 - DNA, 448 bp, Homo sapiens
  misc_feature (1)...(448): n = A,T,C or G
gactgagtgagatggaagatttccgaggcaatagcagaagagtcatttccaagctttttagccaattcactacttggtaatagtgaggttttgggaaatgtcactctttcatcaaattttggcttgcccattgctgtttctacacttgccaggagcagacccagcactgacaacaggtgtcctgatgtccaggaatcatacnttaattgaagagagggnttcagnttcttntgcntcatcncccagctgccagagtgacaaccctgagccaagagaaagattacgactcagctttcagggtgatgagngagttcttgccttacacttggggaaaagggatgantttgcctttgattattacttcttagcgtctgnaagaaagatctttctgnacatctntcttaactacatttttagcctttaaatttttcttttttctgattggaaa

SEQ ID NO: 4111 - DNA, 216 bp, Homo sapiens
  misc_feature (1)...(216): n = A,T,C or G
aactgaggctggtcccntataaggncctacnctaggagcaggagtgannncctccntagggctanncaatganggaaacacanggggttcctggntgtcctagggttgatgctactcgcccagagccagtatggncagntgaccgcaacattttgtacacatgncntactcttccttcattcnntgcatgccaagccaggtcaagacccaggcaca

SEQ ID NO: 4112 - DNA, 114 bp, Homo sapiens
  misc_feature (1)...(114): n = A,T,C or G
gattgacggggcgtgattanaacacgctcccccanaccaggactcacggcgcctggatggtgggctctcctnactgncanganaacctgtggacttggtaagcagccttacctt

SEQ ID NO: 4113 - DNA, 286 bp, Homo sapiens
  misc_feature (1)...(286): n = A,T,C or G
agggaaagaccctagcntgactnaggggatnncagagcatgacnnatcanagtgnnctgcacttgnttagacttgcannngnaanattaatgggtctcctttgtttgtctaaagatgagtgatctnctgaatgggangttagatgtgtttggctaattatagtttaatattcttgaaaaatctagcagaactttcaaagcactgtttgtatttaagagtgtttcagtttanctaatattttttcagnatattnaagtacataaactgctttatccaaaaaaaaata

SEQ ID NO: 4114 - DNA, 141 bp, Homo sapiens
  misc_feature (1)...(141): n = A,T,C or G
tgctggaacctagaagagccacacacttccacctttactannggaccagagantattcacncagngaatcagngtcccctcgccccttncttcataactggttgtncgcaacagtanaatttcgagccttgatcatgattg

SEQ ID NO: 4115 - DNA, 173 bp, Homo sapiens
tgagagcctgatcacacaatcttcatgatctacatgaacatgtaaatactacatgaacacacatgctacagaacccccagaacgtcttcccagcaagagaaagcagtcactggggtgttggaagagtgttgcctgcgtgcagagtattaaaattcaagcatcctcgtcttaaa

SEQ ID NO: 4116 - DNA, 437 bp, Homo sapiens
  misc_feature (1)...(437): n = A,T,C or G
gccttgcatattttacttaataatactgtngctgtaactccatggtttcttggtgaagagaaaagtaatctacatttcctttggctgcagaagaaagggatacaagccagaagaacttggctgcaaagtcattgttcctgatncgctgctgctgcctggntgtgatgttaacagctagtatctgggtttctcttgggttngacccatcctggccacctcnttcggngcatcacacctggtccatgggctcaggcatctattgctggaaatgcactgaccatgggacagttaccttatctgacttcttgtacatttccaagcatctactccctgtggtgcaggagtctgatgtgacaaacatgtgtcacatggcacagtgacttacactttgatccgactaacgtgagttacatccatcaagatttaaataaaaaaaa

SEQ ID NO: 4117 - DNA, 203 bp, Homo sapiens
  misc_feature (1)...(203): n = A,T,C or G
gtccacagaaatcaganctgacggagaacctgncaccgcagtctctcctgttcctactgacctactgagctggaggcaanggtggatgcctcagcagacggcgnnagancatgntggacaatnntgttttnctggctccanntgtgcanaacctgggagggtgaagcctgtgagaaaatgctaccaaataaaagaaaggtcga

SEQ ID NO: 4118 - DNA, 103 bp, Homo sapiens
ttctggaatcacctaggatgggagggtcagagggacacagcactgactgctttacagtcctcttaggtcctacaataaatctggtagatctataaaaaaaaaa

SEQ ID NO: 4119 - DNA, 263 bp, Homo sapiens
  misc_feature (1)...(263): n = A,T,C or G
gactgaggccagaaganatgatgggaggctcctaggaagagcggtgggcgtggaggccctgtcctgacagcacgcatatgggcagcagagttcctgctgtgtaatggttcctcccaccctgaaccatgggcaggcagggcagggctgtttcccggcagtgtgtacatgaggatctggatttggttgagatgtaacatgaagatgatttaattttgtatagtttcagacttttatatataaagcatggtataaggaaaaaaaaa

SEQ ID NO: 4120 - DNA, 487 bp, Homo sapiens
  misc_feature (1)...(487): n = A,T,C or G
gaggctgcacgtggcatgtgaactcaagacttgcatggaagtcaggggcagaggatntctcctgcatgaaagccctgcagactgcatgatgaacagatctcactctgaaggtgacctgctttctgcacagctggggactcgtgagacagaatcacgctcagtagccttctggctctgaactcttcggaggacaagcaattggtctcaactcccagaggctgcctgtacttcctaatcatgggtatgaactcatactgngatatggngcctccctcacaggctcccgagcactgtgtccaactagtcaccacctctaaaactgagcccacaggaaccttacctctttatacattgattacctcattcggctttttcatagtaanggaaaagctaacttttgcttaaggaatgaaaatattctgggagatgaagttgggangatnatggngacattgctgaaaatttgtnggggcctggaaaagatggc

SEQ ID NO: 4121 - DNA, 374 bp, Homo sapiens
  misc_feature (1)...(374): n = A,T,C or G
tggatcccctggcctgtgaggaccaggcctacgcagcagatgggaggctgggcggaggagaaagcttggtttctagtcggacagaagaaaactggcttcaggtaccngagggncttacgagagaggcanntacgtgancctcncncnccacntcttnngaacacnggngacaganncatggggagggngcttttttaaaaggctgngncccnggcgtgccaggggccncatntnctgtccctggggacnanagtcaccgcgtcngnacactctcagcctaggtctggccatgtgaggcgggtgtgctggntaattttacatgtcggtttgaccaggaggagatggcgcctaagagctgctgtctcaaaaaaccg

SEQ ID NO: 4122 - DNA, 299 bp, Homo sapiens
  misc_feature (1)...(299): n = A,T,C or G
gatggagctttggctgcatnagacagtttagcagcagcaggccgtccttcctgagccagctcctatcccaaggctgcaggggccaggtcagtccatcccatgtgtaaaatctcacaggttggtttaccttgctgtcaggcttcatgccaagaaagataaactcccaaaacaggtttcagtagaagacaaactcacattttgtcacacactaaaacttttgctttttttctanaaaagtcactagggaaatactggctagtttaaaattataaccagttngggcgaattataaccagaat

SEQ ID NO: 4123 - DNA, 157 bp, Homo sapiens
gaagacagaacccagccagtgatatggctccgcaggtgaaggcgctcagttcctgtctggtccccagggcccatggcaggagaggccgactccagctgtcctctgattttacctccctcttccttctacctcataaaacatgctaaaatggagaaaa

SEQ ID NO: 4124 - DNA, 318 bp, Homo sapiens
  misc_feature (1)...(318): n = A,T,C or G
agactgaggaccggaaggaggatgtctcattactnagctcctgttgttttcnntntancatcctgaccatgtttccagctctgaagaatggaaagcactcaaganggcaactttcccaatacccanaaataaacccatagccctcgggctggatgaaancctgtgatcctacacagagatgtttgcagganacaggaaggcccagggcntaagtgatgtgactgcnaaaatttcnatanggacntttcctacctgtnccggttcanctggaaccagngcggaactatgacatnggaatgcanacggcactttatccaa

SEQ ID NO: 4125 - DNA, 163 bp, Homo sapiens
  misc_feature (1)...(163): n = A,T,C or G
cgttagcctggagggacccaggcggacagcnggacccnngnacgtntaatggaacatgnctnngtnagactctngcttgcaggtgccaagtgatttttaagcnctgannntgcccagaatctttgtcctcgcgaatgagaagaacaacttttcgagagaaggg

SEQ ID NO: 4126 - DNA, 108 bp, Homo sapiens
  misc_feature (1)...(108): n = A,T,C or G
taacatttcccggacctccgggatgcccngagagaaaactcaatccanaggtcatctgcagcatacnggnttttagatggcttggnacacacctttaaagttaactaa

SEQ ID NO: 4127 - DNA, 114 bp, Homo sapiens
  misc_feature (1)...(114): n = A,T,C or G
agactgaggttcaggcncttgtctgttggtctcggtggtctccacggataanggaagacccttgtatgancatcaggtggatgaatcatttagcttcaggtgtcatacacctgt

SEQ ID NO: 4128 - DNA, 181 bp, Homo sapiens
  misc_feature (1)...(181): n = A,T,C or G
agcctggcacgctgcnntacattnttacgtggagcctgttttgcttctgggcaaggagcaatttgctgntgtggatattcccttccgagtgaaaggngnnnnatcntcatccaatacnaatgccaccctgcttgtaattntttttttntcgctgggagntacnaaaagtttgaaggtcctg

SEQ ID NO: 4129 - DNA, 138 bp, Homo sapiens
  misc_feature (1)...(138): n = A,T,C or G
actgcaatgtcctgccctattnatncngaaactngancngaggaccactggccctcgaactcagagattcacctgtgtctgccncctnnatgttgagacnaacgccnccctngacaggcccataggaacaaagacgaa

SEQ ID NO: 4130 - DNA, 203 bp, Homo sapiens
  misc_feature (1)...(203): n = A,T,C or G
tgctggggaagctcgctcgggtagctcctgctcnngtgttanctgtgagctgaagacancccagntcctgagaanacaagcacatggtngacaagagatctatacccaatcataacagattgtgctnngccttaggaatacacatgctgccattgccacctgccgccgccatggctcccggnnggtccagagatcttcatcaa

SEQ ID NO: 4131 - DNA, 106 bp, Homo sapiens
  misc_feature (1)...(106): n = A,T,C or G
gtggctgttaccaggctgcactccatgctntctgcagcaggntccnctnggcaagcctggagctaattacacttcctagtactgccgtctgcgctgagaaagaagt

SEQ ID NO: 4132 - DNA, 103 bp, Homo sapiens
tgaacaagacggtgtacttgacttatctactaagaaaagtccatgtgctagcagcacttccctgagccattctccaggctgctccagtactcaagggaacggg

SEQ ID NO: 4133 - DNA, 432 bp, Homo sapiens
gactgaggtttgaagaagagtgactgacggtgcaggttgctgcaggagacagtacaaaagagaggagtaattcaaaacatccaatcgccaaagaagacaatgcctgctataagtctttgtcattatcctccgtgctgatggccgcgtcccctcatctactggaaaagcaacggatggctggagattttcatcgatctacatttcgacattgccttgaatgactcggcgtcagtgcatatgcccacagagaatccttcctctctgttctgcattgtccccatctttaaaggtctcctctcttcctctttactctgtagttttagggtctgtgattctccaaagaatgataccccagactcaaacagtatgcaataaaaagagcgtttactctgcagagatccagcctgcaggggtctaccatcaaaaaaaaaa

SEQ ID NO: 4134 - DNA, 537 bp, Homo sapiens
  misc_feature (1)...(537): n = A,T,C or G
gactgagggaaagggaganctggtgtctgcttctaatccgggtgtcaccttggtgtgactttgaccggtgactcactactccagggcccaaattcctcctctgaaacccaggactcccttcagaactccatttacagagacgtattgngtggggaaaatgaactcgtgccaagacaacgggcaaatctgtcgaattatgaaatgctgagtgatgttctaattcccaagccgtcccgtggnggatgaagccggagctccccaaccctaggagtaatcactgaatgggttctgccgaatgtaattgtgccgattgtaatcattttgctccagctctctgcccctgtgacatttatttcttagcccanatattgatctaacagtgggaaattttccatctgaatccgtgatgccggaccctccccaagtccgaagatgtgtttgggaaantntcattttccctggatcacagctgagctatttggcctgaggggaaccgtgcaccgttggagaaacgccttggatcggagagagattttt

SEQ ID NO: 4135 - DNA, 204 bp, Homo sapiens
  misc_feature (1)...(204): n = A,T,C or G
agactgagatcgacctagcaaantgtgctttnctnaagtanccgcttaagagantctggntgatggctttggtctgnnagntcagacntctcttgngcgctnngaaagacctctttttccngagagtctgacnccctcttntggtgngactgaaggganctacaggtgtactcacatttantaaatanatcattctttaaaaaa

SEQ ID NO: 4136 - DNA, 382 bp, Homo sapiens
  misc_feature (1)...(382): n = A,T,C or G
gaactgagagggacaggagcttgatccttttcaaggatcctccaagttagagatcagaacactggcttcactagacgcaaacagggtggtgctgaccggcatgcaaagtccttgagcgctggtgttctactgatcatgatgganaaagacgcaatcaagtgaccttctgtgctgcgcagggatgttttggtcagtggcagatgaaggcagtacgcgtgccccgttggtgtgtancaggctagaacacagagccttagcatgcagcaggctgtatcatatatagctttcatgtgttgcaggctanagtttgcagccttgacatgcagcatgctagaccatagagcttacgtgtgaaggctgggtggctgaggcatgtgtagca

SEQ ID NO: 4137 - DNA, 241 bp, Homo sapiens
  misc_feature (1)...(241): n = A,T,C or G
cttgatcgggctcagtgacanggtgacatnctctaacggcagntnattttcncgccaagcatnattaatcaggtccaagatccttncatcttactgtacctcactgaccatcctcctgcagctttgatcttgncaggcccactgcccacactgtcagcttcctcccggccccgcccttcctctgggncacgtcggatttttttttaagtaaacaatatgcttaagcataaagaagaaaaaa

SEQ ID NO: 4138 - DNA, 171 bp, Homo sapiens
agcatacaactgcataaagataagagatgcaaatatgctatatgcaaataactcaaaaaattcagttgtctgaagaagcaagaataagacattggccaggacatcatatcatctcgcttttaattgcgtacacataacgtctcatctctcgaaaccttggaaaaaaaaaaa

SEQ ID NO: 4139 - DNA, 265 bp, Homo sapiens
  misc_feature (1)...(265): n = A,T,C or G
acctgggcatgctggggaacccangagagtagnangtganaacgacaggancntgccacttgcatgacctctaaactgaaacgtgcctgatttncagacaacacnaatgggagttgcttcnanngaacctttctaaacgggnccacttgccccatatnctttttttgccantncctcnggaaganggagggctaaaagaggttaaaacatttaagaaccatcattaaaaatagatttaaaataattaaaagcacgcagcaattgc

SEQ ID NO: 4140 - DNA, 108 bp, Homo sapiens
  misc_feature (1)...(108): n = A,T,C or G
aaattaaaagtgtagantctaagactnnnttcacaaagggagcanggctgannggaacttctcaangaccttctntgctaattcaancactgatgaccccattcttgg

SEQ ID NO: 4141 - DNA, 279 bp, Homo sapiens
  misc_feature (1)...(279): n = A,T,C or G
gactgagacgcaagatgacagctcaccatcccaccaaggcttcggaagccagagcttgtggggcctggcaagaggctctgggctacaggtgggcactccatctgggcaatgctatctgtgttgggaagcccaaaggagagnggaagcctgaaaactgtcctgtngacgagctacgtgnttaccagcccatctggctccttaaagacacgagtggtatcagagagggnttnntgnntcttgctgcctgaatgaatgtntccagactcttaaaagaaaaaa

SEQ ID NO: 4142 - DNA, 139 bp, Homo sapiens
  misc_feature (1)...(139): n = A,T,C or G
ctcctcctgagaccaccccctcccagcntgtggggagtntcactctaggtcnacccttttccactccaagancancgactgagacccgatttttgaagttttcaacaganntaaaaggtatccttgcttaccagttcac

SEQ ID NO: 4143 - DNA, 179 bp, Homo sapiens
gactgagaacgtaaaagatgtgttgctttcaatcaaggtgaattggatgccatggagtatcatacaaagatcacaaattcaggagagtttgtgttcccattggattctcctcacaaaaagccttatgaatgtcttatactggagagagttaaagaaaaaactgctttagcattaaggta

SEQ ID NO: 4144 - DNA, 353 bp, Homo sapiens
  misc_feature (1)...(353): n = A,T,C or G
gactgaggtacatccatcactgcagctctgccngttctttggccatngatgcntcttnttgacnactaacactacaganggtgnccatggccaggtgantnacacagagatgacaggacaacaacaaacatcagctgngtgggcntccagaatccttccttccccaggaggaggaaagcaaagccacgtccagtgcatcagncatggctcctcatcctgaaaaccagagctttgacctgtanatcttgcagtgaccagtcttcacttcaaagaacccatttaatggctcctagtttctttgtgtcatcacaatctgtgacnatgagagagttcttaataaaaaatgctactta

SEQ ID NO: 4145 - DNA, 449 bp, Homo sapiens
  misc_feature (1)...(449): n = A,T,C or G
gggtgtgaatgttcactgtagcgatgttnaaaactgcagcccagctgtccaaaggcaacananatttgaccgncgctccctcgaanntgtggaaggagtgagggtatcccaaggagacattcgagtccttccctttgactatccgactgtggagataatagatcccaaagaaatggactttctcctganttcttaccttaggagggctgtgaagcccgggccagccagaggaagaacttgtatcccaggaacaagtttcacaattggactggccaccttgtaagacagactagagccaagacaacaatggaccaaatggcaggggacataccctgagcagggatcctcctgccctgttttagcctaaactgcacagtaacaatccaaagatgaactgagcatccttgcttgctcccttccccagtgnggccactgaataaatatccttt

SEQ ID NO: 4146 - DNA, 300 bp, Homo sapiens
  misc_feature (1)...(300): n = A,T,C or G
gactgaggtgactagcatgcngatattcacaccctgacttggctgcttgactactgacatggcccaccggggtggggagagggacttncagacttcagctcggcggatgggtacctccctgctcttccagctttcagtgcatgagcgggaactggacctcgttttcctggatcatagctatgcaaaaccgtggagtgcccacccagatgccagtagtgcccgccccacccgcatgctctttgtaaccccccgtcggcagcaggagaatactatgtgagtttgagaataccaaaaaaaaaa

SEQ ID NO: 4147 - DNA, 321 bp, Homo sapiens
  misc_feature (1)...(321): n = A,T,C or G
gactgaggtgaatgggtgttttgccgacatgnatgtctgcaccacatgctgcctggtgcccacggaggtcagaagaggacattggatcctctcgaactagagttgacaaatgactgtgagctgccacatgggtcctctgaaagaactctgggccttctctccaactcccaagatatatgttttgtcttattttgtttggctttgctttgcttttttcaagacagggtccgactatgtaattcgggctgtcctggaactcacaaaaagatccatatacctctgtctgctatgtgcttgaattaaaagtgtatgccaccatga

SEQ ID NO: 4148 - DNA, 251 bp, Homo sapiens
  misc_feature (1)...(251): n = A,T,C or G
gtcttctggactatgactttattggagaaaatatatatttgggtgaaatagaaacccaaccagaagatgttgttaataattggtataatgaaaatacagattataattttgttgataatacctgttctaanatatgtcgcagttatacacaggtntgtacttggcaagttattanttanctctcttgttcactttagttacaagacaatctttttatagtttgttttaaatccattaaaaaaaaacctcct

SEQ ID NO: 4149 - DNA, 209 bp, Homo sapiens
  misc_feature (1)...(209): n = A,T,C or G
gtatccttatcgcttggattagagnnctgagctgaagganagagaaagcangccgagcacctgcgctgncttcctgttgnttccggactgtggcctacaangtggccagctgcctntggcttaggaaactacggcttccncgctaggatgcattgtaccctgtaacatgtgaaccaaaataaatacccacttaagcttaaaaaaaaaaa

SEQ ID NO: 4150 - DNA, 139 bp, Homo sapiens
  misc_feature (1)...(139): n = A,T,C or G
tgagacttgcctggctaggctagctggccnacctttgctaccacctcancagctctagcatttaagtgttaatttntnccannnactaggacacancaagtaattgagaanggtttttnacttctcatgctcctgcctt

SEQ ID NO: 4151 - DNA, 121 bp, Homo sapiens
gacatgaggtgcacatctttcccctgaacctccaaggacccgaccctgggagcaacttgtcctcctacctctgcttctgaagtcagaagagaacccacattctcttatcaaagaaaaaaaa

SEQ ID NO: 4152 - DNA, 112 bp, Homo sapiens
  misc_feature (1)...(112): n = A,T,C or G
agtacaagcgcccacgcctggngccagnttctgatgcccatttccagctgngttagnngcngcngttataccnttagtncacatcgctgccagaaggcttgagctcgagtcc

SEQ ID NO: 4153 - DNA, 116 bp, Homo sapiens
  misc_feature (1)...(116): n = A,T,C or G
gactgagagtcgtgaaagcaacgattggcggagaagcaccgcaccagggtcaccctaacggccacgtctatctacctctgagaaaataaagtcctanganaatgaagaaaaaaaaa

SEQ ID NO: 4154 - DNA, 139 bp, Homo sapiens
  misc_feature (1)...(139): n = A,T,C or G
gattgatgccgctgatcgntggggtcctagtggaacnatgccccaacaggtccgaagtgggaaggcgcttgctggtggtgtcagcccagttcaatcattgcaggactgtcttgagactctttgatgacctggccatgtt

SEQ ID NO: 4155 - DNA, 192 bp, Homo sapiens
  misc_feature (1)...(192): n = A,T,C or G
gaagaggctggtggagtagtnacacttatctacaccgncgcttactggnacgacgtgaanngactagngggatgngtanggactaaanctgtnttgccacagcaaagaattangactaccncaaagtncagtaacacccacaacatactcctgaaccttgtaattannggaancaatctaccgaagaaaaac

SEQ ID NO: 4156 - DNA, 106 bp, Homo sapiens
  misc_feature (1)...(106): n = A,T,C or G
aagcttgatgtgccanggcgtgtngaagagcttgctganctctnncttatcacaacaagaggangaatggagaagagactgtgcacgangagggtcaagggccgca

SEQ ID NO: 4157 - DNA, 145 bp, Homo sapiens
  misc_feature (1)...(145): n = A,T,C or G
gactgagggcagccagntcggggtgagtgttagcaggagcctggcatcatcttccttctagcccagtccattgtgctgnggacaacatagtcggaaggggagtacgagtaagagccnaattggcaacttcagatcagagcgatta

SEQ ID NO: 4158 - DNA, 151 bp, Homo sapiens
  misc_feature (1)...(151): n = A,T,C or G
tgatatttcatacattgcgttgcaaccanaggtagtgaagatgaattgatagcaatntcgtagtacatgatgcccacggagggctgcgcctncattttgtcgcacagacctgctacttccatacgacannctatncgcaaagattgacttt

SEQ ID NO: 4159 - DNA, 239 bp, Homo sapiens
  misc_feature (1)...(239): n = A,T,C or G
gactgaggagctgacaatccggaatgatggagccttctgtgtgactttaagggtgtgccctggagactattcaagctgtagctgaatgttgacctgtgctgttggaggcagttccaggtttgctatctctgccacccctcagagctgngctatcagctttgggcaggactgagtctggtggtggggattttagggcagaggagaaggcaagggaggcacgtggttttcttcaaaggggg

SEQ ID NO: 4160 - DNA, 449 bp, Homo sapiens
  misc_feature (1)...(449): n = A,T,C or G
actactgaggccctggcccattccaaagatggagtgaaactgactttgcagagtcacagacctacctgctgttgctacctagatttncattcttccaagaacgccctggattcttccactctgccccttattaacacttaaaacttctctttctagaaagaatgtttagtagaacatcagtgttatcatttcttgggggtgggggagttccgtaataaataagcttatcnttgngganggngnaacttaatgacatcattaaggacagngnatacttctcttgttttctcctgngcctctcatctttatgcatgccactttngacagttacacatanggntggtaacaattatnatagaagctnggctccagaaatanatgcttanacaccncttgnccatattaattctcatnaatcaagncntttngccatcaattttcctgggggt

SEQ ID NO: 4161 - DNA, 198 bp, Homo sapiens
  misc_feature (1)...(198): n = A,T,C or G
ctggagccaaatttagtgaaccaccatnaccaagtgttctccccaagccaccaagccactgggttcatgtttccttgaacccttcanataaggaaacgatgacatttcaacttaaaaccttacttaaggtacgggnataaagntagtgttaactttaaattgggacacttacacatgacatcctgatttatgtgcttg

SEQ ID NO: 4162 - DNA, 106 bp, Homo sapiens
  misc_feature (1)...(106): n = A,T,C or G
acggtgccttttacattcattntntctcagatgtgttatgacgngaggtggatnctnntgtcattggacagaacccnccannctacatcaaggactggctggagag

SEQ ID NO: 4163 - DNA, 127 bp, Homo sapiens
  misc_feature (1)...(127): n = A,T,C or G
gactattgggatcacctgcctncagntggccagatactgaaattggcncnntggncactctttntggtggcctcccntgctggagcatcnngagctgcntcaccnagctgcaaaaaggtggttttaa

SEQ ID NO: 4164 - DNA, 182 bp, Homo sapiens
  misc_feature (1)...(182): n = A,T,C or G
tgtgtgcccaggaggttccaatggctgcctgtccaccanntatcaatcagtgcntttccccctggcccttgtcntcccggaatttatcanggaaaccacagcatttgcgtccagtgatancaccccttatgntgtanaacatccagggtagtccagnatnccatacctgtgatggggcctac

SEQ ID NO: 4165 - DNA, 406 bp, Homo sapiens
  misc_feature (1)...(406): n = A,T,C or G
aactgagaaagaagcctaccatggttgtcctatgagagactctgccagcagctgactgagactgatacctatatttacatcaaactgaggtctggaactcttatanaagaattgggggaaggatcaaaaatgtagaaggtattttcanacacataanaagaacanctatancaactaaactagtctctcatagcacccagtgattaagccaacaaccaaaagtgtatacatgagcttgtcactgnccccagaacatatgatgaagcaaatgactgtcttctcttctctcagngggaaagagtacttctaatattggagagaattgatgccccacataagggagatgttagggtgtgatgtggggtaaagaacttagggaccatgcccagagccaaagctgagaagg

SEQ ID NO: 4166 - DNA, 445 bp, Homo sapiens
  misc_feature (1)...(445): n = A,T,C or G
gactgagagaccagaaatagctggaatgctatcttaaaccaaaaatctatttaaatacttacttaatgctgcttaaatgaagaaagatatattaactatccaaaactccacctgataactatcccattgagacactggacaacatgtcgctcaatccaagtcgaccatcttcatcagagttggnggaacttcatgttttttatgtccctgaaggatcgtggaactataaattaaatactatttcaatagaagttattaacaactttatttctgctggatttataagagtatctcctcagcttaccttacaagctctgagggagcgtcttggggagtttcttggtgtagatgctgttgcagaaaaatttttgtttctgaaatgcattggaaataatttagctgnggtaaaggaaaagcaagaatcanaactgaaactcaaatcatt

SEQ ID NO: 4167 - DNA, 189 bp, Homo sapiens
  misc_feature (1)...(189): n = A,T,C or G
gtttcactacctatgnggncacccctgnctggccattggccacagtngcagatcgtagagtaagcntcactagcctgtcanatcccaagtattactttgaaaccctcgttatactgcactnnatantnangacttggnggttnntttnttactctaaaactganaaattaagnctggtttataaggcct

SEQ ID NO: 4168 - DNA, 105 bp, Homo sapiens
  misc_feature (1)...(105): n = A,T,C or G
cttgacgtaactctgtgcagcnagatgatcngcgacaccacccatataanctccaggacnccagantngctccaantgagacataggnggcataagcaggggcag

SEQ ID NO: 4169 - DNA, 357 bp, Homo sapiens
  misc_feature (1)...(357): n = A,T,C or G
gactgaggaaaaaagcacaaagtaactgatgattccaaacaatcacagacaccacgtgaactctgctatgatgatgagacgctatgtttgcactggatgagtaagaccctctgagagccatctgtagtggggctgactacaaaggacctattatcagactacagaaccgtgcaacccccattttacaggtgagaaagctgattagtaacttgcccaaggtgtaagccttaacaagaactgagatttaaagatctgttttaagtccaatgnncgagtgtttgcctttagaaatttacctaaatgaatatggggtacataccaaaacacagttaccaagaagttacttaaaaaaaaaaa

SEQ ID NO: 4170 - DNA, 130 bp, Homo sapiens
  misc_feature (1)...(130): n = A,T,C or G
acgccacatggtcaaaaagttccctnnnttaccgaatctcacctcgagccntagaatctgtgcttccagactcanggcacaggactctttgntgggncttgtaaaaccttanataaaccacgcgaacaaa

SEQ ID NO: 4171 - DNA, 123 bp, Homo sapiens
  misc_feature (1)...(123): n = A,T,C or G
ctgcaagagtcatggagccaggcaatgagctannggaccgncctttnccattcgacantntttctgtttttcccattggaanttatcacattttttttantaaaacacatgtttattaactaa

SEQ ID NO: 4172 - DNA, 112 bp, Homo sapiens
  misc_feature (1)...(112): n = A,T,C or G
gactgaggttcctactattncctgccccagagggcacanaggnnttgnctgagttnagtgctctgttcatagtgaattccgactgactttcatattgttgtcttttttggcc

SEQ ID NO: 4173 - DNA, 295 bp, Homo sapiens
  misc_feature (1)...(295): n = A,T,C or G
gaactgagaacaatcttactgtgtagcgttggctgacctggaactccaaatgcagatcaggctggtcttgaactcctggagatccagtctgcttctgcctcctgatggctgggattaaaagagttggagagatggttcagcaggtaaanatgctnggnctacaagctggacagnctgagnctnatcctgaaaacctacntaaagatgganggaggganccanctccacaaagtngaccngtgncctccatacncncntaataaaagatanttttttaaaaggctaaaaaaaaaaa

SEQ ID NO: 4174 - DNA, 149 bp, Homo sapiens
  misc_feature (1)...(149): n = A,T,C or G
tgagtgaagaagaatgccaaaangacctgctgcaacttgttgatttatggacangctgcctcactatcactctgatttancatcaaaagaatggattctgaatgtaataatgctgggcaaacaantctatgattgacaatgactttgta

SEQ ID NO: 4175 - DNA, 138 bp, Homo sapiens
  misc_feature (1)...(138): n = A,T,C or G
tggaaaactgcaactctgaaagcacnatacntggantacagnaaantcttgaccttccctgntaagnnccatgcctgaanaagctgatgtnaactcatcatgtaatactcaatttgtacaataaattatgaacctgga

SEQ ID NO: 4176 - DNA, 115 bp, Homo sapiens
cctcctgcacactgaggccccccccatggtggaaggagagaagtgattcctccaagtgataccctgacccccgcaatgtgctgtggatgtgcctcctcccataaatagataaagg

SEQ ID NO: 4177 - DNA, 285 bp, Homo sapiens
  misc_feature (1)...(285): n = A,T,C or G
tcagagatgtttaaagaagagagaactaaaacaaaacggggccagagtcagaataaatcaaaggttaagattgaagattcaaaggattccttaccaaagaagagtgacacacagttgggtgaacaaaggaaggatcagatctcatctgatcaaagtaaaagagccaantngganttggnnagacctttgnaggcccntcaacctttccagngtggaccttnnccagaggnagattccacctcagnaaatatatgcnattgcttgcaataaagaacattcttctgc

SEQ ID NO: 4178 - DNA, 341 bp, Homo sapiens
  misc_feature (1)...(341): n = A,T,C or G
cattaaggccttttggagccntgtccatacctcccgttctctccgttactgcactgctctgcggaactgcttgaaggctttgaaagcctttccacgagtggccacaagcgctctttgttctggcccccctnactatgggtngggcccnccnaccttttgggaggatcacnctgccnacgcttgacaaggtngacttccttangnntnttcctcagcttctacagatccgccnagantgggttncctacncccctttgncngcctctacattcgcccccatttntcggcctgagccttcttttnggcgncnnnnaanccttttcnaagccctacttttttgt

SEQ ID NO: 4179 - DNA, 333 bp, Homo sapiens
  misc_feature (1)...(333): n = A,T,C or G
tatcatgaccctatggtgctccctcttcaatancatgcgccatgggatcgagggcnccggggcnccgcaggcacnagatgntttggcgccnnggngcccntgnatgancncatcntngtanacggtaaccnttngcccttccacgnganacaatcccnnnnnggagaaaccgcttnagcctgggccccntaactatgggctggggctttatgnnaacaaagggggaggttcggggggaggccanccccctttcccacgcttctgggaggccnttaaccttcttcaaggcttacatanncttattttttttaaaccttttggaaaaaaaaataa

SEQ ID NO: 4180 - DNA, 622 bp, Homo sapiens
  misc_feature (1)...(622): n = A,T,C or G
actgaggtctcagttcctcagactgactcaggactcagcagccagccaactctccaaagaaggcgaaagagatgcagccttgcctttcccaacttggtgtaagaggacagacagagccactgccacaatactctgtaggtgacacccaggagaatatgacaggaagtggagctatcctggtatgtttgaccaganaagtggtgtcaggggctgaagaagtccgctacacagcattgaggagacagcgggcattctccactgcttcancatggcttcctgatttctttcatggtcccccaagacttcctgacagtcactccttcacctcacgccctcttcctagttgtctcccggctctaggcagagggctaggaacccaagaaaggacagtgctacttggtgtcccagtacaggaactgtgtatctggtggcacagcagagagagctccaggtggtgtgtggaaatgccctggggggggagaggttancttgatgatctgggcctaaaggaagccagaatcctgtaagccataggcagagagagcatttnagcaggaccaggcagaacaagggggaggaantaaagttacccgatgaagacccttggtgaaagcaaaaatga

SEQ ID NO: 4181 - DNA, 299 bp, Homo sapiens
  misc_feature (1)...(299): n = A,T,C or G
tctggatacatctgggcaggatattcacccggcttttgcgtgaccagtgcttggcatctggtgatggtgtgctgggccgcttttgctntttgacgacccctcgtctnttggaccaagttgcaagcaaaaattggnccaccttgganccccttaacanaaagcaagccttttgggacttagngggccaacaaggnggggaccttgggggancacctgnttggaaaatgctttatggttggccgcaancccttcntttgtttacaaagttggggggnccccctttgggggaaaaaccttaa

SEQ ID NO: 4182 - DNA, 102 bp, Homo sapiens
  misc_feature (1)...(102): n = A,T,C or G
ctactggagctaaatatactttcttctgtctcgacnctgttaatnctacagagnaatactncaccaatgactgttcaaaagatacttattattgtgggagct

SEQ ID NO: 4183 - DNA, 108 bp, Homo sapiens
  misc_feature (1)...(108): n = A,T,C or G
tgcactttttgcaagacagtggtcaacaggagggcccatgatgatgatgaatgtcntctnggacatttaatgattgctngcaataaatggtgctgcatatctgggcct

SEQ ID NO: 4184 - DNA, 126 bp, Homo sapiens
  misc_feature (1)...(126): n = A,T,C or G
tttgggctgaggtaaaagnctgggancgaggccatanttacttngttgtggaactctcntnggtcggacaggaagcatgnctnggttcnataaggtgctggtacaagntgcaggctccactcccaa

SEQ ID NO: 4185 - DNA, 204 bp, Homo sapiens
  misc_feature (1)...(204): n = A,T,C or G
gacctgaacccgggaccttctggaagagcagtagagctctcaaccantgagncatctcaccngccccntttcttttgtgnttaanancttaaataaacaggnncgnactatgtacccantaccaactntataaagnnagtgacaatgatattctgcctgaggcatcaaggggtcaaagtgtcctccctatcctccccccccccc

SEQ ID NO: 4186 - DNA, 373 bp, Homo sapiens
  misc_feature (1)...(373): n = A,T,C or G
caagagtaaatgcagatnctatgaggatcanangatnnncctngcncaggctctcctgtccngggnatacccatggagcatgggaacnttatacagacaagccnggccactgtgccatcactgcangnctnagggacaccagcncaaaagcacantactaccagaaaaacttcttgtcaagagaaccaaccttggacccacccaaggctcctgagcttaccagttagaggacttagaaaaccacctctggatcatggggaactctacagaacaagtgacaagatctccatataaatcaagagatgatggggaaaaagacggtggcaagtacatttcctgatccctnaccacnttaantttttgagatacagct

SEQ ID NO: 4187 - DNA, 327 bp, Homo sapiens
gaactgagtgtttccagaagaaagctggttgcttctaaccaggagttaacatcagtggccgccagtagcatatcatccacatactgaagcaaagaaacacgtggcatggtctacctgtactcacgctcacgtggatcacgctcccatggagcatccatcaaaaatggaacgctgagttttcagaagccttggacagggttgagactcatcaagtcgtttgtcttgtctttattagtcagaggttttcacagacctgcccccttatataacctccttgagctttctgagttgcaataaaaatgtttgcctgcttcttaaaaaaaaaaa

SEQ ID NO: 4188 - DNA, 207 bp, Homo sapiens
  misc_feature (1)...(207): n = A,T,C or G
caactgagatggcgagagggcaggagccccttaggcagctgtgaccctgngctggatggaactntgcagctgacacaggctgcctcaggacatttaagncactgaagaatgaacggncttttaattagggagaacaagggccttggcttctatgatgcancttctcctgggcagnnccaataatcaganaaggaaacgtcgccgaga

SEQ ID NO: 4189 - DNA, 161 bp, Homo sapiens
  misc_feature (1)...(161): n = A,T,C or G
cctcagacacaccacnaagagggcanccaatcccaccacaggatggccgtgagntaccatgcagacnccgggacctgaactcaaganctccaaaacagnagccaangctcccaaccactgagccatccctccagccccccctttttttttaaataaaggga

SEQ ID NO: 4190 - DNA, 212 bp, Homo sapiens
  misc_feature (1)...(212): n = A,T,C or G
agactgaggatggacggtgcngccttgaactgtgagccaagaggaaccccttctccctcagctgcgtttgtcagagtattttatcaagtcaacaggcgagacactaagcgtgactcttcctcacgccaagaagactcacgacccggtgagtgtgggagtggccaccgagagctactgaggagctggccagagatgtcataaaataaaaataa

SEQ ID NO: 4191 - DNA, 166 bp, Homo sapiens
  misc_feature (1)...(166): n = A,T,C or G
gagtgctgaacgacctgtgnangccctnactggctgagccnggatctgaaccaaggcangcatctctgcaggtgcggatgttgcgacccagggagggggacccagacttgttgtacatattttgcatactgtctgattaaacacaaacagacctcaaaaaaaaaaa

SEQ ID NO: 4192 - DNA, 262 bp, Homo sapiens
  misc_feature (1)...(262): n = A,T,C or G
gggagcaacaaggaggagctgcgncctncttgtgctctttatnttgnccggaaagtnatgtggatnctcaanacctnntcatnggnccanacctggaatatgcatntgtgagcccgtganactaccgaaggtctgantttaactgggntccttatattgcccaatanngctttngaattacccttataacctaataggtagccaccctttanaaggccgcatcaaatgaagaataaagacactaaccgaagctaacgacact

SEQ ID NO: 4193 - DNA, 105 bp, Homo sapiens
  misc_feature (1)...(105): n = A,T,C or G
gatgcctccaagttcnagtgaacacctcttccgcaccttgaacaccaacagntgacggcaccatcgacttccgggagttcatcattgctctgagtgtagacctct

SEQ ID NO: 4194 - DNA, 610 bp, Homo sapiens
  misc_feature (1)...(610): n = A,T,C or G
aactggaaggacagtcctatcgtaattggatgcacctaatggnaggggacgctaaacangncccccactantggnantgnaantcgcctggcggactnggtcgttgcacactacatcggnnccgcggcttcgcttgttaccgnctggttatccatganagggtcctctagagcatttgtcgcatttcgctactgccaatgagcctnaccatcnatcgtggacgactgcactcgccgtncatnctcccctggggtggcnctngaaagcnacagagcgtaagctcgacagaattntaagcgccacgtaatgaccacatcgcatgccacccagngtgcatggcctattcnaaataaagccgaccggctcgttggcncctncaccntttcgcatncgttaagttnccttgtccactggnttggtgactacatggggaatggttncaaagacaatggttcgttcttcacctntnaagcganaattgnggaaccaagcaactaccaagtaagngggnggtcggctcgttttcttaattgcggtnggcgccangctcctaggtncaattggcgcncgaagnaaaaanttctccccaatacaataatgacccctttgg

SEQ ID NO: 4195 - DNA, 125 bp, Homo sapiens
  misc_feature (1)...(125): n = A,T,C or G
tcctgtttcgcctccctgaggaaagagggataggangctgnctcaagactgncttgantactggttgctgcatttttccctcgttaacacaattaaaaacaaacttgatgcctgaaaaaaaaaaa

SEQ ID NO: 4196 - DNA, 335 bp, Homo sapiens
caccaaagcctagcttcaagattttccttctttgtggacctgaggagatggatcagtagttaaagaaaactagctgcacttctactgcctccacctcaaaagtacttgggattataggtgtgtgccaatatactcagcctttaggatttttttctttttttcagtaccagggatcaagagcaaggtctcaagcatactgacccaatgctgtgctactgagcctgtatttgaaatttttagctattttcttgaattccttgccacaatcaaaaagattgtacagagacactgttttgatacttatgaaggagaaagacattttttccttttctttg

SEQ ID NO: 4197 - DNA, 164 bp, Homo sapiens
gactgagcctaacaaattgctgtagttctgaacatcaagctgttgtatgtcctggttataggctttcactgctgtggcttctagaatcatattactaactaatatgttgagtgctcattgtccactgaagtaaaaggcttgtttatatattctaaaaaaaaaaa

SEQ ID NO: 4198 - DNA, 106 bp, Homo sapiens
  misc_feature (1)...(106): n = A,T,C or G
cagtctggtttgagaccaacgcagtccgggtgacttctgctatgtcgggggngcancacatggcncntctncgatgcgtgtcgaagncacgcggcttttttgtgcg

SEQ ID NO: 4199 - DNA, 457 bp, Homo sapiens
  misc_feature (1)...(457): n = A,T,C or G
gagacctttcttctttncctgacgaagttgtggnccacagagcgctggtttgtcagtggngngcntcttagtctcttcacagcaatgactatagccttgacatttcagggagtgggtggagtcttcagttgtggctttgaaaaaaggttctgaagttaaaacataatgaaaaattataaaatgaaccccttttggtttatttctgaaaatcctattctgttattactacctagcttcagcaatatatatatatatattntaatngctatagggtttctggcttntgtcacgtgcttgtattttagntgtacagattgtnggagaactattntttgtactgtnggaacacactgccagtcagagctaaaaaaggcagagtttgctttctcggagggaaatacaaaatatttgnaaattttcataatttttaataccatttgtataatttttgtaatac

SEQ ID NO: 4200 - DNA, 146 bp, Homo sapiens
  misc_feature (1)...(146): n = A,T,C or G
gaaggaagaatctgtggactgntnncacccagccttcaaagacgtactgtttaagacangctcggaaaactaattgtcatgtgaaatcacccaaattttcaattctggaaatgacatccaactttcaaacctgccaaaaaaaaaaa

SEQ ID NO: 4201 - DNA, 213 bp, Homo sapiens
  misc_feature (1)...(213): n = A,T,C or G
gcctacagaaaaacaaagngagccgnccatcctgnagctggagtgacaggtgctgagagcagcggggctttggatgctgttggtgtggacatctctgcagcacagcaactgattttctcaaggaatctggaataatgttaggaattctgccctaattttgtgtattttaccatatcaaaaatgtgactccattttaaaagcagaaaaaaaaaa

SEQ ID NO: 4202 - DNA, 111 bp, Homo sapiens
  misc_feature (1)...(111): n = A,T,C or G
tattcaagctacttgtgattggcgantctngggnngganagcnctggcttctncttaggtntgcagtgagtatgaagtgacagactttgnnctccttcaataacagttaac

SEQ ID NO: 4203 - DNA, 206 bp, Homo sapiens
  misc_feature (1)...(206): n = A,T,C or G
gactgaggtggggtctttagatcccgtggccgcccgctgcccggacaagacaaaagtcagcaccgactcggncagctccagtggatccgaacagcagcaggaaagagtcgtgagccttatctgagagccgccctcgagtcaggctatagctggccagaccagaatattagtgaagtgtgagtgtgaggtgtggtgtgtgtgtgtgt

SEQ ID NO: 4204 - DNA, 321 bp, Homo sapiens
  misc_feature (1)...(321): n = A,T,C or G
gactgagaggttatggcatgatcccagccanggtctctgaggacaagtctgtganaaccgagttccagaggacagggangggcctttggtgatcctgggatggttattttcanactctgncttgtgatgggtctnaaagaacacaacctggcctgcagtctcnaaanaacccaaacaaanantcttgggncnnggcncttaaaaccnagtnccagaggacagggaangncctttggtgatcctgggatggttattttcaaactctgtcttgtgatgggtctcanagaacacaacctggcctgcagtctccaaaaaaaaaaa

SEQ ID NO: 4205 - DNA, 560 bp, Homo sapiens
  misc_feature (1)...(560): n = A,T,C or G
gactgagtgctgatagtcatgacaggcagctgtacactgagctgaaggttctgctgaggaaaagagtgaagagggtgcttctctactnactcacccactcctgcctcactgctctagcatcctcctatgctgggacatcaagcctctgtagaaccaaggacatgagtctcttangtagagaaaatangtgagatctgatgaccttggngtgtatcagttgatacaattcatctntaanggccatgtgaggacatctntggttanaaactaaagctagtttgcacattgttatttttgtctttgccctgttgttttgaatcaccnattttcattctgtngtcattnggnaaangttcaccacncagcatacagntgctattgctcattcccagtatgattcataaactgaaattcattctggattgtanaagngaacactccttccacttggactcantanccatcgcgtttcacaggatggaaccccattattattaatgctaacatttcaataaaatgtagnaaaatttntgtccataaatctttatgctgctaacagt

SEQ ID NO: 4206 - DNA, 468 bp, Homo sapiens
  misc_feature (1)...(468): n = A,T,C or G
gactgagggcctcactgntattgagacatcctgggntgcctnccnagctgaccttaccgactgtccctttactgatgaagtntntgntgnttnnagagnncancnttacancttttcnctccaatgtctggtcanaccatgncngtctgnctgtntgnctgtctgtnatgtctctggtagaatttacttnagtgttttggagatgccanctnccatgagangacccctcactgctgtttctggttgttcttacccaacactggaaggtacatcntaaacactgatggagaantncaagtgaccatggcctccaccaacgggcgaccangngntcaaatncatggncctttgggagtcattttcattcacagcaacncacacttaaatggntaatcctggntgcagaaccttgtgggcttctctatgacgaatgtaaaaggaataaagggaatcacttgccaaccttac

SEQ ID NO: 4207 - DNA, 451 bp, Homo sapiens
  misc_feature (1)...(451): n = A,T,C or G
gactgaggagaagccaattgaagaacaccgggctcctgtagtgccacctacggccacagggtggcactgaaactcagaaacagcttttctagggcaggcttctgagaaccaaggtcgtggaaaaagtcaggacagctcacttcgtctcattaccgtataacatgaagtgtgactacctagtttctaccatcgagtaggccccttaggctggaagcctactataatcagaaaaacccanacatccagacgctagaacctggatcccacagccaggcccagacctttttcctctaaatttctctcatagagaggcgtcagggcacattccagagatcccagaacttgagaggctgagacaggaaaactaccaagagtaggccattctacagcacacagtgaacttcaggctagacagagctacagtgtgagaccctgtctttaaaaaaaaaaa

SEQ ID NO: 4208 - DNA, 320 bp, Homo sapiens
acgtgagactgagtgtcctcagcatttccaatctcagaatcctctaccaagtcagactgtttccacgtcccagttatggaatacagcccttgcagatcagaacggaccctgtaaactcacctgccagtgctgaggtccaggctgctgccatagggagaacttcggaggccgaaggcttccagagagtgactgggagaaggcctgagaaagaccagagtccagaagtaagggaggctgactgaccaagcaactgtacaaagccactactcccagcaagaccttcaagaggacttaaaagctactctccatcaaaaaaaaaa

SEQ ID NO: 4209 - DNA, 375 bp, Homo sapiens
  misc_feature (1)...(375): n = A,T,C or G
gaactgagattgcggtctccaggctacagntaggacttgttgaggcttcaaaatcaaaggtgctgctccagtctacacagctttggactcatcacccaggatactttgctgtcctgggatcaagcacctgaagctgtcctgaggcttcattcttcatgtgagcttcaggagtcggatttacctgattctccccttagtgatgctttctgtgacaaagtcacaaatatttccaagtgttgctgtagactgagacggccagagtcatcccatggtcacctgctggaggcaatctgctgctgtcacttgacaagagtgtgtgaatcagacatgggtgagcatggtggcacttagcgctcgatgtggatgggggtgggg

SEQ ID NO: 4210 - DNA, 159 bp, Homo sapiens
  misc_feature (1)...(159): n = A,T,C or G
agactgagggagtgttttgttctccttgtaccaggctagctggcctaccagctctcaggaattcttctgtccctatcgattgcagaggnntnttntgtncnggccaggtgggtcctgtgcgacatnaactatgngacccagcgctggaagtagtagtag

SEQ ID NO: 4211 - DNA, 114 bp, Homo sapiens
  misc_feature (1)...(114): n = A,T,C or G
gactgaggacccagggnacgacatacaccttagcgctncaanctccanggcgatntatnatggacatattgaagancccaacgggaaagancnatacaacgccactttcctgga

SEQ ID NO: 4212 - DNA, 437 bp, Homo sapiens
  misc_feature (1)...(437): n = A,T,C or G
ggtattgtgtgattttccagnaacaagtcttcagaatcatcattacacatctccatttgtaagtgggttccactctaggagacactcatatcagctggaattgtctatcacctgaggataattgttaatgaaaagcatgtaattttgtgtgtgtgctctgaggagcattgaaggtccctaattgaatgttgtctcaatacctcaaaagcatctttaaatgcttgacctagcttgctcaatgcaagtccttgtttattaattaattgtagcatattggactgaggatgaacctagtggtatagcacttacctactaacaggcaaaaggttctgggttctgtccaacacagcctgtgattgtacacaattatatatggaatgtaaaagtatggtttttcatgaaaaataaaatgcgttataaattgggaaaaaaaaaaa

SEQ ID NO: 4213 - DNA, 142 bp, Homo sapiens
  misc_feature (1)...(142): n = A,T,C or G
agactgagcagccccgtcttaaaggtngacatctgagtggtttcggcagctgccnntaatgaagagttttagtgtaaagtgagctgctcatccgaagaaataaagacaacctggcatgggtgttccttcctaaaaaaaaaaa

SEQ ID NO: 4214 - DNA, 220 bp, Homo sapiens
  misc_feature (1)...(220): n = A,T,C or G
taaggtaaacaagcaatgagtgtgtttctggtaaatacaccacagagnntgttaacanntgaggatagtggcnngaaggtcttgantgaagacaagcgcagaacgttgaccatgagctcataagtattcgaacataggacntgnagatggaanangcttacaatctgntgtttgnggnncctcctttgtatgtcccacagagtgggaaggcctttttttt

SEQ ID NO: 4215 - DNA, 294 bp, Homo sapiens
  misc_feature (1)...(294): n = A,T,C or G
gtgtctcacacacacctgnatgangatatcctggactgcacgaagaagaggattgnntaggagntngaggnggagnngatgatgaacccgatntgactacggtcaccactgngaacctgaacaggagtctnctcataatgnancgcagtctgcanantncattgggagctacagatgaaaatggttgggtntngtnttttccatgggngcatgatcaccctacccgtnnggnacannggactactgcctctcccccagcagccntcctgatgnggatcttgtgagctcctccca

SEQ ID NO: 4216 - DNA, 292 bp, Homo sapiens
  misc_feature (1)...(292): n = A,T,C or G
taaaggaaggatccattgattgttctgtagtctaacagatagggcgctgcacctaagcctgattattcagtgtcctccattcagaggggactcgatggagtaggcctattggagaagttggaatctatttagaggacagcatgcagatttgaacaatacagtgccttcgaatttanaaaatcagtaataggttcttatttaaaggccagncgtgagttttaaaagaggttacaaaaattgtatgtaatattagtaaagtgtngacatatanctggngaactagtagttagaa

SEQ ID NO: 4217 - DNA, 257 bp, Homo sapiens
  misc_feature (1)...(257): n = A,T,C or G
ttttgagactgagtgggttngggctgggtagcagcctggncagaaggccatacttncttgttgggganctctcaaaggtnggacaggangcatggtgnaaggactgnaaaanactcnagcnntcgctcacttcttcaaactancagcaggcanaagaagaaactgaggnccaaagtgatgaaaagacttgcccatcgtcattagttagcgcataggcaaaggngaccaattttttgactgaaaccacaaaaaaaaaa

SEQ ID NO: 4218 - DNA, 108 bp, Homo sapiens
tgctgctgtccggggaacagctggaagcttcccggaacatctgtgcagaatcccatgagcacttgccctatacaaccttgggcaagcccatcaactcagtagtgatag

SEQ ID NO: 4219 - DNA, 134 bp, Homo sapiens
  misc_feature (1)...(134): n = A,T,C or G
ttgaccgagttattaatgctacttttggaatncaggggangtgtgattggcttngttggaaagcannacangacngncctgatgngagttnanaagncgnggacccacatgagaggagagaactcgcccttggg

SEQ ID NO: 4220 - DNA, 108 bp, Homo sapiens
  misc_feature (1)...(108): n = A,T,C or G
atgtacgcctgctccaangttgtctgtacccgntccctgatnangancanctctctcagagaacanctctcagcatgctgantcggtccggctgtcctgcagacggag

SEQ ID NO: 4221 - DNA, 119 bp, Homo sapiens
  misc_feature (1)...(119): n = A,T,C or G
ggcatgtgtggaccgntctctgaacacnaagntggccttggaccnacagagcatncncntgcctccttctctagagtgcgggaatctgacagcnccannctggctaattacttctttgt

SEQ ID NO: 4222 - DNA, 225 bp, Homo sapiens
  misc_feature (1)...(225): n = A,T,C or G
gactgaggtggggtctttncatacctgttatcccagcactcgggtaggcagagacaggaggatctgaaatccaaggacatcctcagctacataggagttggaggacagcctgggctacgtgagactctgcttcaggaagaaagaaaggagctggaggcagcactgtagctgcacaacctctgcgaatctctttataaatacagacaccgttgaaaaccccaaaaa

SEQ ID NO: 4223 - DNA, 177 bp, Homo sapiens
  misc_feature (1)...(177): n = A,T,C or G
tcctatgtgactctcccngggggtggaganatgggnnaagcgntaaaancactgactgtacttangangatcctgagttcnaatcccagnnaccacntcggtggcttacaaccntctcggggngaccnttgacaccctctattgggcgtctgaagacngntataatgtctatagtaa

SEQ ID NO: 4224 - DNA, 199 bp, Homo sapiens
  misc_feature (1)...(199): n = A,T,C or G
agaaatctagcgctgcatctgtctcnctgccaggcgtcaagttcctcttgctacataagcncacaggtgtattcaccancatcagactnnttttccgtnaataatgancagcttcctgnctttngcgtcancattgaatctgtgctatggnctctcacggatgtacgctgncgtccttnatccaagttgaaaattggca

SEQ ID NO: 4225 - DNA, 221 bp, Homo sapiens
  misc_feature (1)...(221): n = A,T,C or G
gtgttctgagatagcctgctggaagacngtacactactnagagaggacnaccccactatacactnngggtcgccacagtatccagagttttttttnngnaaccnagnatcttatgtgagtggctaactcngacgctgnctccgtattncgnatgcnaagactatagtatgngtttgaagcaccttatgttttgagtaaaantgngatatttgttcccacag

SEQ ID NO: 4226 - DNA, 270 bp, Homo sapiens
  misc_feature (1)...(270): n = A,T,C or G
gactgagggctgacaacattcctcatgtttgcactccatggaangcttncagagaggagaactgtgtcccagcctcaatggaactgatctgtatcctgagagtatgctgcatctccatggaaacagatgatggcaagaaggactatcttcgatggcagttgccacattcccacagctgaatcaaaatacagaggtctcctgtagctcaggctaactactcagccatnactacagccctttaaatctgattaaagcccagcctcccctgta

SEQ ID NO: 4227 - DNA, 180 bp, Homo sapiens
  misc_feature (1)...(180): n = A,T,C or G
catgagtcagcaggaggtaccaggaccagccagaatgccaggagcnctgctgagcctctctcaatgaagngaagancagagaagactcaagaccaacgaagaggtgcaagcactccatcactgaccnctttttttncnatgggaggcngtctccaaacancaagcatcctctcatgggtt

SEQ ID NO: 4228 - DNA, 111 bp, Homo sapiens
  misc_feature (1)...(111): n = A,T,C or G
aacaagcggaactcaattgcagggnttcccccacgtgtagagcgtctggaagaatttgaatcagtgtaaaatccagatttttaatagtgacaaataaaaagtcctatttgt

SEQ ID NO: 4229 - DNA, 184 bp, Homo sapiens
  misc_feature (1)...(184): n = A,T,C or G
gcgcattgactgcgtangcaaaagaccctgancccacaactggngctgacttatataggcctagganagacntgactcacacctgggttggtttagcattnnacctcattngcatgtctcacntatgagttngttatactttctnangaacctnaacagaaccttattatcatgcctgaggccc

SEQ ID NO: 4230 - DNA, 185 bp, Homo sapiens
  misc_feature (1)...(185): n = A,T,C or G
ttcatgtctcaatgaagangatganccaaanganaganggaaganggagaaagangananattgaantagaanaagcctggcttgtgtcctctatgcctttgatcccagcactctggaggcagaggtcagtgggttcagaggtcagcctggngtacaganaacaggaaatatatatgtgtgtgtg

SEQ ID NO: 4231 - DNA, 196 bp, Homo sapiens
  misc_feature (1)...(196): n = A,T,C or G
ccactacctctactttattttggggaaccatnttcaccggngactgnccagccncaaganaaactnnaacctgcccatgttnacncggtctcgagaaggttcttncattctgngnnncgactgtacttacgtataagncttanctngttctttagaaccnggacctgctcaacgnaagatggccctaggaaattga

SEQ ID NO: 4232 - DNA, 342 bp, Homo sapiens
  misc_feature (1)...(342): n = A,T,C or G
acgtggctagagaaccctaccacctcttgctccttatnctctctctacaagaaaccagctatgaccanagtaggcngagcagatacncagntctcatctttaacaccaggagccaacacaggagaatgcttgaggtggagatgtgaattgctttaggggcagcttcttgaagaggagactacaggcctcaggggcccaggacattcctacaggactttttctattctgtnananactctnnnctganctgnncacctggnaagaactcnnntntaagnangacncaccntncngagngcantccccagcacgaggaataagagnantatgagacacccctca

SEQ ID NO: 4233 - DNA, 127 bp, Homo sapiens
  misc_feature (1)...(127): n = A,T,C or G
tttgagtactgagtgcacaataantgcttttcagccaggcgttgatgtgacaagcactcacaggaccaggcatgtggatctctgagttgcaggctggagctacatggagaaaccctatcttgaaaag

SEQ ID NO: 4234 - DNA, 126 bp, Homo sapiens
tttgagactgaggttaagtacccctgcatggctcttcacagttggtgacttctggcctggatgcaggtgaagaaagactcatctttcctttgggggctggctactaggaatttgaccatgctctag

SEQ ID NO: 4235 - DNA, 108 bp, Homo sapiens
  misc_feature (1)...(108): n = A,T,C or G
cggtactgcgtcgctcctgnccctnntgggtctcgactgttggtatgntgtttttgggcatgatntttctnaggangggggctgtgtncttgcggctgaagtagacgg

SEQ ID NO: 4236 - DNA, 109 bp, Homo sapiens
  misc_feature (1)...(109): n = A,T,C or G
tctttctgagtgcaagcccggtgcctngcgctaattnnttgcntgagattgtcnggcngcctnganagcaaacaaataaataaacaaacagctgtgatcaaaaaaaaaa

SEQ ID NO: 4237 - DNA, 181 bp, Homo sapiens
  misc_feature (1)...(181): n = A,T,C or G
tagaagacacaggaggnacattcatcatngggccantgatgaccctgangatgctgggcgtcgaatagnnccancttagcttgtntttnactacgcatntattaccatacgggggngagaagccttcaggaaaggtgntccagaaacgncattccacnngtgcccactttggaaaacctat

SEQ ID NO: 4238 - DNA, 153 bp, Homo sapiens
gagactgaggtcagtcacactttgactcagcagttcaccttcggagcattaccctagtggacatccatctgtgcctcgaggctgcttcaaggatgctctggactatgtattgtttattataatatagtgaggcttggccccataaaaaaaaaa

SEQ ID NO: 4239 - DNA, 135 bp, Homo sapiens
  misc_feature (1)...(135): n = A,T,C or G
tctctctacatatccaggctagacccaactgttgacttgggacccagancaacanatctgcncacatgtttgggtaatanncttgcagatcaagcttgaaaaagtatctaggctgcctgcccattttcttttcct

SEQ ID NO: 4240 - DNA, 320 bp, Homo sapiens
  misc_feature (1)...(320): n = A,T,C or G
gactgaggtctacatcatccgagtcacgtggtccagtggcgccacggtaggccatctaccggcgctacagcaagttctttgacctccagatgcagatgttggacaagttccccatggaaggaggacagaaagaccccaagcagaggatcattccatttctgccaggcaaaatcctcttccgccgcagccacatccgggacgtagccgtcaaacgcctgataccaattgatgaatattgtaaggccctgatccagntgcccncctacatctctcanngtgatgaggttctgcagttnttcgagacaagacctgaggacctg

SEQ ID NO: 4241 - DNA, 194 bp, Homo sapiens
  misc_feature (1)...(194): n = A,T,C or G
tacttgcaaaaccaggcggcagatcctnctttgtaccgtcgnccagcgcagctnccactggagctaanaccccggaagcttncccnnccggcnnnangaccganaccgaagatntggaccaaatagtgngacttnaggaccaaggccaaggctcgcatggccctntaggattcatccactctggcgccaccttg

SEQ ID NO: 4242 - DNA, 170 bp, Homo sapiens
  misc_feature (1)...(170): n = A,T,C or G
tcctgacctcacaccaaactgncacttcctaagaccgttccctcnngaccttangacagtcttcctcaangtnaanactgnntncgnactgcaatgnntgctcttggacgttcanaacttcacttctgcntggaaatatattgactgggtggaaggaaactccttcccca

SEQ ID NO: 4243 - DNA, 364 bp, Homo sapiens
  misc_feature (1)...(364): n = A,T,C or G
gactgagcttcgcagnactggcatccctgaggtacatgttaaactctcactgtggatctgtcactaaattccaccgaggattcggctaccaggagtggaactccagaatcttaaagccagttcccgcctacgccgacaaatgcattttaatttcgaaggaatcactcgctcttctacttccaaagcaaatacacaagacatctctctcagaagatatccccgaagccaaccagagcttctgatggccaacctggtggatacagtgatcattgtcgggctcatgaatttcatgaggatataagaaagttgatggaagttttagcttttccaataaacgtttgggtttcacccctaaaaaaaaaaa

SEQ ID NO: 4244 - DNA, 126 bp, Homo sapiens
  misc_feature (1)...(126): n = A,T,C or G
ctttaacctgggggcatgttnngntnggtatcctagcncagganaagggaaccttaacntggnttgcaatatgatattgaacattccttttcctntgtgggcagtaaatgaaagatacttgaaaag

SEQ ID NO: 4245 - DNA, 153 bp, Homo sapiens
  misc_feature (1)...(153): n = A,T,C or G
gacttcactgcgacanagncccttgcttagaatncngttcctnttccttnnggttgnganttggccnttcaaacggacagagttcagtcagattcatggatagatggntgggacggnaactttcaaagagcactnttaaaacgctcacaaacc

SEQ ID NO: 4246 - DNA, 200 bp, Homo sapiens
agactgagtaccagaatgtgacacagaggacctggacgatggatttctccccagaccctgttgagaacttcggtcatctgacttccaaggccgtgaatctcctcgtgcttccaggttccctgccagcttcctaaatgcaccctgggaagatcttaggacagcacattccaatctagcaagtgctgtgatcaaaaaaaaaa

SEQ ID NO: 4247 - DNA, 153 bp, Homo sapiens
  misc_feature (1)...(153): n = A,T,C or G
gccaggggctgcgggcacaggangctttgggcctgtnntttnccagngcgtcttgtgnggtcagagcccaggaggacctcagcagaggaaagacaggcgtgtgtgcncntacaccacagntgnnantgccctcagaggctaaaggcgaacatc

SEQ ID NO: 4248 - DNA, 156 bp, Homo sapiens
  misc_feature (1)...(156): n = A,T,C or G
agactgaggtggggtctttcagtnggaggangaagaanaagganacagttgagggcanaggaggtgaaggtgctgccgccttcgcngnggtncccgctcggcgagccgnaacntncgacctgntttcctctacagcnctctttgtgcaataaagtt

SEQ ID NO: 4249 - DNA, 173 bp, Homo sapiens
  misc_feature (1)...(173): n = A,T,C or G
agaccctgtctcaacagaatatacnancaaaanagntnttaanttggttangntctaggnannaaaaactgaataggagctttcaaaaccacgcccctctcttgcagacaatctgaagcatcccatatcccacacctannagtaaaacaganctattcctataacaaaaaaaa

SEQ ID NO: 4250 - DNA, 133 bp, Homo sapiens
  misc_feature (1)...(133): n = A,T,C or G
gactgagggggctttgacgacgcagtggaagaacggcngatcaacgaggnantacnatatatggnagaanaacacccnntttgtntatgatgttggngatgaccnctnccctggagtggcccagacttaactg

SEQ ID NO: 4251 - DNA, 470 bp, Homo sapiens
  misc_feature (1)...(470): n = A,T,C or G
gtctgaggggtatggggacccanncccaagtcttctactgcggcccaggaggtgaagactctggatggcatcttctccgaacaggnggccatgggctactcacactccttggtgatagctgcgagacgagagccgaggctgagaaggagaagctgcagaggctacctgagtacaccccacgcaccctntgagcaggccggccctcccctcgnggcagctgtcctttccacgtgcactgggaccagaagtcanacaaggaatttaggaancanaagttgaccaagggtgcattgggttcgcctccccgaggctccgtttccaagcgattcaacgttaactacctttttctgtatgcttnccaaagngtttccctcaatgtttgattaaaaacatttgctcatagccagcctgcctttctacgaaataggcaggacctctgagcgatgtaggtttttttattaaaaaaaaaa

SEQ ID NO: 4252 - DNA, 510 bp, Homo sapiens
  misc_feature (1)...(510): n = A,T,C or G
gactgaggtatgctttatggagggagatcttgagttttcccaagttttataagtgaattctccaggaaatacgaccttcagagaatcctcgtaagtgaagtcaggcccccagtgagcgcnttgancnngnngagcagctctgcgcgcgcgcgtctctcctgatcacacaggcaagtgtcctctctgtggccggatcagaggtgtcagcaaatgaggcctggagcagcttcaggaaggaaggaaatcagagaagctgggaaggcagcctttcctccactgctccgggtcacagagctgaccccggataggaaggaggtcagcactggcggccaggcgattcctcaaggaaaaccccaaaggatgagcagggaaggaggaaggaagcattctcagccaaggggatggagtagggcgctgagcttctgccaaccatggaaaggccagccctttggttctcacatntgaagaaaacaccacgaaggncccctgaaaactgtcccatcgggcttc

SEQ ID NO: 4253 - DNA, 477 bp, Homo sapiens
  misc_feature (1)...(477): n = A,T,C or G
tggagagcattgagttnctnataccanaggattaacttacnccaggcngggcctggnattcanaccccaatncagcatcacnctgtctccaggctccctggcatgttngtttgatcacattaagcnnncntggaggagangactcagagccgcctaaaggctttttgangnccccattgaagagggcccagtattcacgaacaggagcaaaggggccntattctatttntnnacttnnggggatccgnacagaaanntcctntgaggttgtccagctaatgacncttcatgantgacactggctttttcttctattggganccncnacatgccatttnacctaatttcctacaaatnccagggacctcnannnaactgagaacatntgcctccggtttatgggtgcaaacnttcngtgtnttagaaaagccctccattcnagctacttcaatnaaagggncaaaatttattccaaaa

SEQ ID NO: 4254 - DNA, 353 bp, Homo sapiens
  misc_feature (1)...(353): n = A,T,C or G
tagctcctcgtcttcaaatgtgaggctacancatatacantattaaaaacgaacctgcnggaaacaggtctagtgtgtctcatgctggccttgaatttacantgttgcccacagagaccttgnactcttgctgacttcctgcctccatcgntcacgtgctgagatggtggncatgtactgncatattcagtttaaaggcagctaganattgagccaaaggtttggagctggttgagcactctgccaantgtgccaaanccntanccatacctagangcccttatatcagcagttattcaaatccntccaagactggtagttgcaataaagccacaaaactctaaaaaaaaaaa

SEQ ID NO: 4255 - DNA, 267 bp, Homo sapiens
  misc_feature (1)...(267): n = A,T,C or G
tgagctccggtcctcgaccgtncttccggncagcgcgagggggcggagccgggggcggggccggcctcacccggaatgaaaacaacggcggcctttgccgcatccgggcactcggcaggtcgcagctggctcggcagtggcgcaggtttcattttcggttcagagcgctgatcttgatgatttacgagttttctgcgttggaacgcccagcaacacnaccatttgaaacanttctccaattaaaattgaaaactggaaaaaaaaaaa

SEQ ID NO: 4256 - DNA, 110 bp, Homo sapiens
  misc_feature (1)...(110): n = A,T,C or G
gactgagggtttcctatgtngtcctgaacgtactctacagaccagaatggcttcaaacacagagattactgtgcctgtctaaagttaataaatctttaaaaaacaaataa

SEQ ID NO: 4257 - DNA, 311 bp, Homo sapiens
  misc_feature (1)...(311): n = A,T,C or G
gacgatgagcccagagtactgggacacctcctgatctgacgattgttanggagtctggattctgaggggctgtcctcaggngtggcgatacagatctgtctttttgagagggantatgnntcaggtgcttagaggccctgcctgaatggngtcttcagtatgattcactctctagggagcacaccagagagctggacacgggaatctgtgtgctggnttatccccagagcactcacccccaanantgnctgctgaaaggctcttttgttttnggagctntttgctctanaagaataaacctcggccttctt

SEQ ID NO: 4258 - DNA, 126 bp, Homo sapiens
  misc_feature (1)...(126): n = A,T,C or G
gacattgacgtggtaggatcgcctttgngngtgtatacatngacatgngtgaagactnnggangaangnattgccacatatcatgcnantgcctaacattttttgacaacaccttgcctaatgatc

SEQ ID NO: 4259 - DNA, 102 bp, Homo sapiens
  misc_feature (1)...(102): n = A,T,C or G
tacgtggaatgttgagtacccttgtnanctggcncnccgacgacacgtctgagcctnnaggagcanatgtaattctgtccagntgggctctcacagaggaac

SEQ ID NO: 4260 - DNA, 366 bp, Homo sapiens
  misc_feature (1)...(366): n = A,T,C or G
tcctaggatacttggnctgtcatnactcanagatcaaactccattcacngagggnaatggaagcagtcctaggtgggaccctgcagctctctgctgcttggtaaccctcaatagcctgacgggngcgagagcacttgagctggaggagaggaccagcagcttcccagaaggaactctgctccctgctgcccatctggggagtcctaaacactactggagatgtgactcagaggtgtccaggagtgaccatgacagatcacagcactctgtaaatattgtgtcaggctgggatcacagcgggacactctgggcaaccaaaactctgatcttcactgtgagaaaagaagtcaagcgggtaaaaaaaaa

SEQ ID NO: 4261 - DNA, 149 bp, Homo sapiens
  misc_feature (1)...(149): n = A,T,C or G
cgagactgaggtggggncggcctgtctctgtctnagctattcacgancnccggccnttacngnacccacattgtagcncagnggtgncnttctatgcgagaccacattacctgntataccttaatgtatagtaagtaaagaaaataaaa

SEQ ID NO: 4262 - DNA, 265 bp, Homo sapiens
  misc_feature (1)...(265): n = A,T,C or G
cttgcagctcagaggtcngagaaagtgnctgtggctgaganagcccgntcactcaccncagccagggctaagccacagnaggactcacctggacncctcacccagccccgtgagagctgtgaganggggaaggcttcaccctgcccaggntggaagantcagtatgcggtctgctgtctttcaagcacaatcatggatccnggagagctccagggngccctttgttttaaatacgcaatatngtttatgaaaacatgtgaggtgc

SEQ ID NO: 4263 - DNA, 133 bp, Homo sapiens
  misc_feature (1)...(133): n = A,T,C or G
tagaacttgatggccccngggatgaagganaaggagggccanaggnccnnctcatcactaggatgcccaggagggagagggagagatgangnggagagggcaccctctcagaggtgaagaggaggatgggtgg

SEQ ID NO: 4264 - DNA, 167 bp, Homo sapiens
  misc_feature (1)...(167): n = A,T,C or G
aagagactgaggtgctacagctgggcctcacctacgaanatgggtacccctctgctgatccccagcaaagagagggctgtaggacctctggtgtgacctccagatgcagcccagaaattctgcctttgcccttgcttggaaacactggagtccccaaggacaggtga

SEQ ID NO: 4265 - DNA, 244 bp, Homo sapiens
  misc_feature (1)...(244): n = A,T,C or G
ttgttttttcggccgaagccaccaacccgngaggtaataaantttaagctcnttttcggtccgngggggtaggggcttaatttngtggccttgggccgcttnaacccncccanattntagggnnaggggccacngggannggccaactttagggcaanntttaatcccattcccttaggcctttncntttgttggnccagaaaagggtnaaaaaaangggganaggcccttaaaaggccttgaa

SEQ ID NO: 4266 - DNA, 268 bp, Homo sapiens
  misc_feature (1)...(268): n = A,T,C or G
tgctgatgtactggcacaaggtgtgcctnctcagggaaagnttnaagtttggcccacatgaatttagtcaagcancancaagggntaattggacagnnatgtanncagaccgcatgtcnccaatgaatgctcatgangagncattnacctcatcnnttannacctttcttaaganaccngatagtcgtctcgaatanaancttgngcctatgtcctggagtgctcttgcaggcnctaacacagggntcggatgaaaggtgacggttca

SEQ ID NO: 4267 - DNA, 134 bp, Homo sapiens
  misc_feature (1)...(134): n = A,T,C or G
tgtctgcagattgtcagtagttatntggacatttgaacnctggnaatnacnggnnngcgtttctggnctttttatagcaggnttcatcaaataaaaatacangcttcagcngtgcttacagtataaaaaaaaaa

SEQ ID NO: 4268 - DNA, 103 bp, Homo sapiens
  misc_feature (1)...(103): n = A,T,C or G
gaaatgcttcctgtcagatgaatgtcaagngtttctgtcctctattaaatagccnattattaccttttcaccctatanngtttacaagtgaaagaaaagaaaa

SEQ ID NO: 4269 - DNA, 192 bp, Homo sapiens
  misc_feature (1)...(192): n = A,T,C or G
gcaaaattaaacaacaacaggagtgtagaaaagaaaccctcatagcctgctccaagctcatggaggcacacaccctttaggaattgtgcaggctgggcatgtagctcagtgggtaacacttatctagcacatgtgcagtcctnggntccatnttcagcaccacaagaaaacattcttggagccacacactga

SEQ ID NO: 4270 - DNA, 182 bp, Homo sapiens
  misc_feature (1)...(182): n = A,T,C or G
gagactgaaataaggcattccaggnntcctgggntaaagtgagctgcagaaaagccaccctcaaaggaacgcaagtctagatgtcggcactgccatccaggttctcaggagatgagttgtatgccttgacatccacctgacgtgagaacaaataaagaagtttgtatactcaaaaaaaaaaa

SEQ ID NO: 4271 - DNA, 227 bp, Homo sapiens
  misc_feature (1)...(227): n = A,T,C or G
gaacactgagaattaaggaaaacacccaaatntaaaacaaaaggaaacctnccgggctggtgaganggctnantgggttagagcacccgactggtcttccgatggtccagagttcaaanaccatcanccacanggaggagtcacaaccanccgaaacatgatctgactncntcttntgnagngtnangaagacagnatacagggtacgttacatataataaataaat

SEQ ID NO: 4272 - DNA, 535 bp, Homo sapiens
  misc_feature (1)...(535): n = A,T,C or G
gactgaggtggggtctttcactgcgtctgnntccgcaccatgttcttcnancanngacatttgnngaggacgccgtacangcctntaggcgagngacgtacctgncttatgntnncctngnntangngtngntncatnctgtctncnangatgnngggaggcgctnntttccctcacctggccaccattttataacgttcacttnangcatatagcannttggagggctacgggtcggatgngccanncgaattttccngncttcaggaccacggnggagaattctggacctctcccctcattgaatacgctggatagctcagcgaagtggacctgctgtttctatgccgaatagggttatttgggtggcccatgcctattacttacttcgcccatagtttgggggctgatctcactttgatcctattcctttagtatgacaactaaagtatggcaattgccctccttccccccaaatactttgtaacattaattactcaagattaaacacttgatctggctttaaaaaaaaaaa

SEQ ID NO: 4273 - DNA, 184 bp, Homo sapiens
gactgaggagcgggaaaatcagctccgccccaggcgctgtgagcctaaggccctaggcagaggtcaggatcggggcagacccatctcccgaagtgatctgagatgttggtggccatttccccgaccccaaggattacccagcacacaccattgctcatgtgagtcccccacaacaagaaaaaaa

SEQ ID NO: 4274 - DNA, 222 bp, Homo sapiens
  misc_feature (1)...(222): n = A,T,C or G
acactttagacacgggagacaagtgtgtganagatgctctanccntaggcnanggctntccngnncacagnctggtgctcccttgngggangggtaacgacttgaaaagngcanaagaaggcagatccacacttcntngactaangcagaatggacaatctnagacccctgcntgtagcgggcagtntagacaaccgaacatcatctatgggccaagagctg

SEQ ID NO: 4275 - DNA, 123 bp, Homo sapiens
  misc_feature (1)...(123): n = A,T,C or G
catcagaataagaatatgctatctnaaacccactcnnaaaagancaacacgccctgaannncantggtgctttgctttangatttgcccagntctaaanctgtgancactgacctgtacataa

SEQ ID NO: 4276 - DNA, 148 bp, Homo sapiens
  misc_feature (1)...(148): n = A,T,C or G
ttgtggaactctcaaaggacggacaggaagcanggcgtgnctccctnccttgnanaactaganacaganaaacaangcctgnacatgtccnggtgtcagaagaattctgnggctagaaacagacaccttcntgtcacatggggtatca

SEQ ID NO: 4277 - DNA, 327 bp, Homo sapiens
  misc_feature (1)...(327): n = A,T,C or G
actgagagtttccccaggnctgaagtcagcctgaaaaatgtcagccctcaaagctgtcttccagtatatcagatgaaaaccaggnccagntacgtcaagaaaattgcccatcgcttcaccagtccaaagcagaaacctcctcgactnanganacanagaaancttnccaagangctaatatgagnctncccccctttgncgaaagacttaaactttnnggnnccntcatcttnttttttntgnggggggggntacctttattantnngacaaccattaaaaaaancacatcctctacaaaaaaangctcaacgtgtccccccctaag

SEQ ID NO: 4278 - DNA, 107 bp, Homo sapiens
  misc_feature (1)...(107): n = A,T,C or G
gaagatggggagccacataccaagcanctcatataaganggagaggaagttgnnaancacaggnnactcgggctccggaactatgtncnacaagatgaatgacctca

SEQ ID NO: 4279 - DNA, 181 bp, Homo sapiens
  misc_feature (1)...(181): n = A,T,C or G
attgctgacactggatganccatnacntgacagcatatacngtaataccataccttngnnagataaggcaggaggccatctgccagctactcagngagctcanagttgcctaagttacttaagaccctgatacactggcacacacnaacacgcangtgcacacacaataaaaagataaaaa

SEQ ID NO: 4280 - DNA, 355 bp, Homo sapiens
  misc_feature (1)...(355): n = A,T,C or G
gaactgagggacagatgcaggcggctggggatgggtgcagatcccagggagctcgaagtgtagagaaagcagcattccctcagcgtggattggctactgcgaatggaaaaccagaacccacttctatcagttgacattcattctgggaatngttngcctttggatttgaactttccattcttcagacaagtgtatctctgatcatctctccctgaacagggacaactcataccacattgcttcctttggggctttagagcgctatagacaaacataatccaagtttgtgnggaatgaatatttagtatataagttttgggatttttttttttttttnanggaaaaagggggggga

SEQ ID NO: 4281 - DNA, 107 bp, Homo sapiens
  misc_feature (1)...(107): n = A,T,C or G
agacccaaggtgacagagnnngggccccatgggaacaagcatggtggaggcgcctcagggccacgggccacgtctgttgcaataaatctgcagctctgcttcttgca

SEQ ID NO: 4282 - DNA, 231 bp, Homo sapiens
  misc_feature (1)...(231): n = A,T,C or G
tctgctcggcctgctgcaaatatgctgcatggaaggtttataatgggacgctagcatcagacccagcttctgcagagtctcaaggctggtactacacaaagacgacaggcgtgtcagcttaaacaacagcggtctggagagaancggagagagcagcatccctgtgctgtgtanatgtgtggaaagatgcngnctgcattcacaacagccttccatgctcaaaaaaaaaaa

SEQ ID NO: 4283 - DNA, 503 bp, Homo sapiens
  misc_feature (1)...(503): n = A,T,C or G
gactgagaatgcagggttcccaagcactgccaggcaagaaggaagactgaatactggtatggcgtgagcagactggcagctctgtcacccatccctggttggatgtcccctctgcagccttgagaggcccaaggccagggttggcaagcacatgctggtcctgagatccttgcctggctggaaatccctgctgcctcttcccttgatggccttcccagcatcctctactccatggctctcaactccccagccccactgccaaggngccactaaaggccagcctgctaacatgtccttgtcagtgctgaaagatgccaggacctcatgcccaacccagctctgcctgggcacagcctgctgggtacaaacaccaggagcagtaaaagaagatgtcggccggnctgaggttctccatggacacttctatttggtgagggccactgtgcgtctggccctagcgatgttgggagccacaagagggagcagcatccagccttgccgtc

SEQ ID NO: 4284 - DNA, 384 bp, Homo sapiens
  misc_feature (1)...(384): n = A,T,C or G
gactgaggtggggtctttcattctgaggcggagaagctcggaagtttcagccctccagggtcgcttcgcttcgcgtcacttagcagccgcccactgaggatgccacccccgtcctgcgtgggccccgaccggggtgacactgtcaagcagttgtgcctcccgaggtggaggaactgccttgtgaaacgcactcaaacttccgaaagcgtcgcgcccaaattcccagagagcaacttggaaatctgtgtgttgattggagccgctgttgtggggggggggaanaacgtggtctccaggaggaattccgttaatatntgtcgccaagggggaaccaggcttgaaatggggttggtganaggaatgaaaaaccggtgtttttataaa

SEQ ID NO: 4285 - DNA, 540 bp, Homo sapiens
  misc_feature (1)...(540): n = A,T,C or G
gactgagggacctttccaggtttttgagccatatccacttagaactngnnggaccngtnctgcnattatganccancntagcttggaagaaggcctggatatgangaacanacantctacanatganaggcacncncatgcagggatgcaaanaagccacncatgggacnanancctgagcctgagtgatagttgattttgacaagccagagaaattatattctcccaaaagaattgggttcactccagtttctccagctccttccccaaccagaggatttggaaagcaatgcttgtcgccatccttgcaaatgtttgtgagcagcagcgggatgccaccgagtcctgttctcaatccaagacattgtttcanggaggagccagagcccggtcaagtgcattaggcccagtgttcttggtcctcttaagagaaaaggggaaatggagatggaaagccagcctaagagacccttccaaggcaccaccagcatgctgtctaccaatcctgcacaattgtctgatttcagttccggactgctg

SEQ ID NO: 4286 - DNA, 309 bp, Homo sapiens
  misc_feature (1)...(309): n = A,T,C or G
ctattaaaaagtggagtaaagangantgtctttcttcaagatttaagtttctgaaggtangaagagaaacagcngtttggctttgcttaaggngctgatgactgancacngaaccttgagcacgctatacangtnctctaccaccaagctacattccagctctctatgattttgaaaaaggaactcnccatattgcccaggttagntcactttgnngctcagtcagggaactcacaatcttacngcatnattntttcaaacacttnctacngccntgancccctacacttggaaaaataaattttaaaa

SEQ ID NO: 4287 - DNA, 106 bp, Homo sapiens
  misc_feature (1)...(106): n = A,T,C or G
tccggggcagcagtgngttncggtgtccagagttgaactcanncgaggtgggaanngnatttgancccanagnaaaacaccctgctccaggctccctggatgatag

SEQ ID NO: 4288 - DNA, 122 bp, Homo sapiens
  misc_feature (1)...(122): n = A,T,C or G
atgcttttcattctaacacccaggtaagcgagagcggntggagctctgtgagtctgaggccancctannctacagagcangttccaggccaatcaaagcaacatagtgaattcctgtctcat

SEQ ID NO: 4289 - DNA, 500 bp, Homo sapiens
  misc_feature (1)...(500): n = A,T,C or G
gactgaggtggggtcnttccnacnacacccttgagcggaggcccctgaannggtnagtaagacggcnttggntccccnggnnctnangntacgggcacntngtgagccatcagatgtaggtgctgtgactcagactctggtcttccacaagagcagcgagcgagtgctcctgactactgagcgatctctccagcccctggtttcctccttttcctgacctgcctgggaacctgaggtgactaaggcaggatgcttttcccaaggacacttaagtcaagtgctctggaagcttccagcttcttccatgaacaaggtcaacttttccaaactggcggagaaaggctccgaggctaatgtttttaatgcacgcctttgtttgcttctgccctgactgtggcctttttatattttatgggcttaatgttctaatttcgtgctagggccctgaggcaattcaccgaaggatgtgattttagaaaatccaggaaataaaggaattg

SEQ ID NO: 4290 - DNA, 327 bp, Homo sapiens
  misc_feature (1)...(327): n = A,T,C or G
gaactgagatcactgtggcacgtggactccccccccacacgacacacgcacgtacaagctgaggctcggaaggagaacgttccaggccacgaggtggggggaggaattacaccatntnccccngatgcacngtnaccatncnctgagtcntgctgnctttnaattnctacagcntagagactggacctnantagggntcccaatagccaattnngannacatgcccttanntatcaatccangngggtctcctnaggactatgaggtancccctgtctttcctgtcacggnggaaatggnaagccattgtcaggaggaggggcccac

SEQ ID NO: 4291 - DNA, 120 bp, Homo sapiens
  misc_feature (1)...(120): n = A,T,C or G
cacaatgcttgcacagtgtaccagcangagcagagggagcagccttaacctgtctccacacatcgaaatgttgngttctgcctttactgtcattcctggtacctattgcagcacagtgca

SEQ ID NO: 4292 - DNA, 115 bp, Homo sapiens
  misc_feature (1)...(115): n = A,T,C or G
gcaggcctgaggccatagcttgnctgcanggcctgngaaggaactctganactgtgcactnanaangaacccggaatcttttntaccaaagcanntacccacctttcttttgtat

SEQ ID NO: 4293 - DNA, 128 bp, Homo sapiens
  misc_feature (1)...(128): n = A,T,C or G
tcctccgtgtcaacagctgctgaagncacacnnccattctctaactaccacccctcancnnagngtgctgctagccccctnctccctgccanngcccagnggtctcccagaacagaataaccaaagag

SEQ ID NO: 4294 - DNA, 163 bp, Homo sapiens
  misc_feature (1)...(163): n = A,T,C or G
gcaccaagtcacctggngacttatcccanctggcatcatagccagtaaccacatatgtaaatgaagccatccttcaaccaagatgtcatggacccacagagacctgntgagctanattanagcacaaagaccagttgatccatcataaaactgtgagaagtaa

SEQ ID NO: 4295 - DNA, 232 bp, Homo sapiens
  misc_feature (1)...(232): n = A,T,C or G
acctttgttcacattctgnccaccaggaccgctgctccgacaataggattncaaaccanagnccagntgncacagaactcatgacagagcacggcctcaaacttaacagctctcctcccgcccacacctcccgagtgttcagcacgagtgttcagcgcctcagctgtgcccgaccacaggcaccgatagncttccttttgntcnctgaanacctcactgtaaggacagctcg

SEQ ID NO: 4296 - DNA, 362 bp, Homo sapiens
gactgagtctgttgctgtggagggatgcgcacaggagctcacaggaacttgagggaatgctgacatcagctcagcttctccagccaccgaagccctggacagacctgcaagaagtgcagagaggatcaacacacaagcctcgagttgggcctggagccttcagtagcaggcagctggagacaccaccacagaaatgagtttttaagaccctgggctgagtgtccaggaacacctattcttctgtgggaggaaagaacacagctgtttacctcctgtgcccgatccaaacccagcgaatccactgctcggggtcccaaagcctgaggtctgctgggacaaggacccgaaggagctggggtgac

SEQ ID NO: 4297 - DNA, 109 bp, Homo sapiens
  misc_feature (1)...(109): n = A,T,C or G
accgggcctttgcccatacggnnaatacctgcagaccgcatgcngaaagtgcgaaagncctgngcttnctgacatcnctcattcaaaaatgcctacccactgaaagatg

SEQ ID NO: 4298 - DNA, 409 bp, Homo sapiens
  misc_feature (1)...(409): n = A,T,C or G
gactgagctcaggttttgcctgtatatatctatgantgtatgacgtatgtnccacatgcttgtgcctggcacacaaaggtcanaaganaccatgtnctctggaactggagttatggatgggtgtgaaccaccattaggtatagggaactgaacccaggtcctctgtaaaccaacaagtatccaagcgttgagtcatntntccagcccntgggtntgtcttaatccngaacagttgnggggtntcttangacatgcnggagganttcctttaangacctgnagganaaattanacatctgcacttaccgtattcatcttatcacttcttcataatatgctgggtggtgggcaccanngacctacatttaactccanaattatctttgaaaaagatttatctttagctatg

SEQ ID NO: 4299 - DNA, 177 bp, Homo sapiens
  misc_feature (1)...(177): n = A,T,C or G
agagtagcggaagctgngcntncaccacagacgcaaggacattgcnacagtnttctaattccagtncttgggaggtggagagtggagagtcaacgagttncaaccccgctttctncctggactattggatgacagagatacctgaccccaaagcataacaatagaatccttcttaga

SEQ ID NO: 4300 - DNA, 118 bp, Homo sapiens
  misc_feature (1)...(118): n = A,T,C or G
acatgctgactgtctagctnatncattttgagcatgctattattgtcacaaggaaactttcttgtgcccangtncctactgttgcctaggaaactttgtnacgcctgggggtgattgc

SEQ ID NO: 4301 - DNA, 409 bp, Homo sapiens
  misc_feature (1)...(409): n = A,T,C or G
gccatcatgggagaaactaanacctccaggaaaaggancatccagggtttggaatgatctcancacncanactgtggnggnccagcctcctggtactgctgtaaccggtggcctttctttcanngccnataagtcaactgnttaaaacctanngtntggccagctgccacaatgcctggangngggatctaaggcccttgccccgcgtcacaaatcctgatgcacgctctntgctcagccactcggaaatctgctcacacagccacagagcttcaagcgaaaacccaacaggtgagaagtttganaggctnccacctcccttcaccctctggangcccaacacgtctcaaaacagagacaggagaatggcctacagtcaagaggcangntncctcacctaaccctgggt

SEQ ID NO: 4302 - DNA, 194 bp, Homo sapiens
  misc_feature (1)...(194): n = A,T,C or G
ctgataatgcctaaaactntaccttncaacangtangggacacctnntttaaccaattaacagactatttatatgccgaatgacaattacngtacccaatcaccatccntcttaagnaanaaaccagcccntgcgagggacagtanccaataaaatgaagggaggcgggactaanggatatgccctccaataaa

SEQ ID NO: 4303 - DNA, 132 bp, Homo sapiens
  misc_feature (1)...(132): n = A,T,C or G
gagactgaggaggagaccggaataattctgcccctactcgcggaggcgcttcgncnggcttggtggctantctgacgancagggnntcngntnaagaagagatgaacaacntccagccctggacaaagagtg

SEQ ID NO: 4304 - DNA, 482 bp, Homo sapiens
  misc_feature (1)...(482): n = A,T,C or G
gactgaggctgcccacgctgcagtggncttgnctgtggngctcgtcttangatgggntttggaggctgntgagatggctcagnggnnantagtgctgactgcnctnnggatggtccatgagattnagancncngaagccacgatgggcgnttcacatncatcntnaccganctgnnacnccctctcctngagtagcctgaagacaccgtncnccnggacntncatgcattngntnantctgattgngnacaaggatttnaaggaggngcttgttcctccaccattatgagatgcagtcaccaaacaggaagatgaggcatctctgtccccaggtctctaacgagagtgctggtgtgactcagtttccctacacgggcttgtccaggaagggagagctccagctccttgaacctaacccaggacctgcagaaggattaatgtaacaagctaaggcaagaaaataaanttaaacaaaccaaaga

SEQ ID NO: 4305 - DNA, 256 bp, Homo sapiens
  misc_feature (1)...(256): n = A,T,C or G
actgaggcccgtctactccagcatggctggcgagtccccgacaagcctttctccacatctctgcagngtgaacacccaggcagcctncntctcanagcctggctccgtagccaaacnagtctagtgatgtnatcgttgccatggaaactctctccaggcgtcaggcaggaccaacctcccctgagcagtntccctttgngtggactttgcaatgcgttgccaaggcagtgaggcctgctggggcccaaacaatcca

SEQ ID NO: 4306 - DNA, 550 bp, Homo sapiens
  misc_feature (1)...(550): n = A,T,C or G
gactgagatcttcgactnggacctggctgctccccttggcacctgttgcagtgcctcaaaggctggagtcacccnaagccgctctcttcgtcagttctgtcagtagctggagaatctccacgcancagtnagactgcctcccagcacagaggcctggcgtgtntgaaaactangagtnaggatnctnagaacgntnncatnnggtcngatgcgnncacncggcgttgnntncctgggaaggaanaaagcangggccnttacctgtgcatacatgancatatncgtnatctatatnagaaaagncccanaggnggctcacaccaggcagccatctttgaaanatgaancctgccncacacagtgtggtttggncngtcactggacattcgctcattctgttntngctacctggnacagtgttgcttgtcttcctttancggnaacttccccngttccacacttctnagctgagtcgttttatctgngaagagttcccttaactccatgatcagaccatttcccctcagctaatagtttctgaggcttcctc

SEQ ID NO: 4307 - DNA, 519 bp, Homo sapiens
  misc_feature (1)...(519): n = A,T,C or G
tccttgctttcccttgtngnntacnatnnntcttctcgangntcnagacttntgnactgcgcaccccactcgacctgactgatcgcccggcttacttggtgcatngtngcatgtattctgaggcaggtgntnagaacacacggttcaggcatgacggaatgaggaggctcatcttgtcagncgcttgatgagataacctctggttcggatcctatatagcagcnttcctgctcccctttgtccaannagagncccccagaanctgantgctgaaaanaantgctggngcgggctgcataaactntccccaatgggaaaggaagcatcatatagagtttcctgtgagtgccagaaagaaaagtagtcaatatcacataggttacctgaaaaattcttctgtgaatgcatagacacaataatggcgcttttgtctgtggggcttttagaaactgcagataattccaaactatataaatgtcatgtcttctaatatatgagtcagataaagtttaattcatc

SEQ ID NO: 4308 - DNA, 547 bp, Homo sapiens
  misc_feature (1)...(547): n = A,T,C or G
gactgagtgttctgggtcttcattcacctgcactccaagttcatccaccatcagccatgagccatacggtcaggcatccacagtgttaaccatactcttgcttctccgttttctgtaccccgttttattttttatttttttctgttgctgggacaaaacatttgatagaaagcaaccttaagaaaggagccggtttagttttgcttccagattgaaagatgatattccaaaatggtgaagagggcncagagagagaagattaaagctgcttacttacatctgggcagaccagaaagcagacagacncagagngatggcgttcataggatttttgtcctctgaactttagggttatttgttatatgtcacgaatacctaatattacattagatataattatgttacatagaagtaataagaaattttccctaaggcatgaactatttttgagactatgacatanattctntaaaatgagctttattacaaagaccacaactacttcccatgcacatttataaaggaccagagataagtttaattcatc

SEQ ID NO: 4309 - DNA, 513 bp, Homo sapiens
  misc_feature (1)...(513): n = A,T,C or G
agaaatccctgggaggctgaccatgcactctccatagagcaaaatgaagtcagctctgcacagcatngagctctgaggatgcacaggagacagagcacacactgtactcaccaggacgtccaagcaagaaccagcagcgttgttttcaccacntcttgggataacctattttattgtatgtccgattctatcttaatgctgaaatcacatgcntttaccaacagtnntcaagtaaaagactaatatttgaagagaaagaaaaccaagatagaaatttactcaattaaattatcccagacaataacaaattaccgaaacacgggaagaacattttctaacatttacctaagcaaatttaaaggcgctaggagagcaaatttgtatttgaggctgagcatgcaattgggcacactggacacccaagngctgatttaaaagaatatgatatgttttactcaaatatgcaaagtaacattttttcaatgaacttaaaaaattatgacaaatttcatg

SEQ ID NO: 4310 - DNA, 368 bp, Homo sapiens
  misc_feature (1)...(368): n = A,T,C or G
gactgagcccttttgaacttggacagnnatatccctgaagaccacctacttaatacctgctctgacatcctaacactgaggtggaatcctggctccttggcagtgagagttcacaagaggtcgcaggagcttctcacatgtctgctacccaaggaattgtctttaggtcatgcattcatcctggaggatgattacagcaagtgattagtggggcatttgttgttctacatttcctggaangatgtgaaaacacttcctttcctcccagataaggtatgttgaaaaacgggagatagctccacccaagtctcacttagtgcatcagtctcttttcttgttgctgngaataaatatccatagaagtattt

SEQ ID NO: 4311 - DNA, 265 bp, Homo sapiens
  misc_feature (1)...(265): n = A,T,C or G
gactgaggtcctgtgcgcaggtgcgggagctggaatgcacattcttctccactggagatggagcactgtctggaatagaccnattttaggatacacaggacatntnacgagtttaagaattcagggagccacatgcaagcatctctcacagtcaagtaaaacctagaaatcagctattgcgaactctggaaactacacacatttggaaactagcaacatgctcttatataacaggctcacagatcaataatgcaagaaaaaaaaa

SEQ ID NO: 4312 - DNA, 131 bp, Homo sapiens
  misc_feature (1)...(131): n = A,T,C or G
cactgactcgtattccgaaggtnctgngtcaaaggccagccacccanatggaggcttcacaactatcacgnagtganantcttgananccgntctnctgntgagtctgaagggagctacaggcgtcctcac

SEQ ID NO: 4313 - DNA, 119 bp, Homo sapiens
  misc_feature (1)...(119): n = A,T,C or G
tgacagaatcctgtcgaagctgtagccatgcccttgtaccagctatcctggaactccatctgtagaccangcttggacttcaaacctcangagatntgcctgncgctgctttccaagtg

SEQ ID NO: 4314 - DNA, 280 bp, Homo sapiens
  misc_feature (1)...(280): n = A,T,C or G
ctgtcagcggctacagantggctacaccctggatgannggccctggaccctgctcctcacataccatggcttcttccacatggtcttgctgttggggctgtcttggcgactcttacancnaaanagagggancaatactcanngnnagacnctatnnaacangatngcccttntgggtgaananttgttgncagnccctangcacatgcaccttcgtgagctgctcngtgacctacaggcagccatnatctgaagagcccgagggtcctaggtgatgaat

SEQ ID NO: 4315 - DNA, 114 bp, Homo sapiens
  misc_feature (1)...(114): n = A,T,C or G
caattacaaattacctggcccgcattagncttttcngcactcaaggnaatatganttctcaggggcnggggtnctcaagactnggggcataagaggaacctggggggtttggat

SEQ ID NO: 4316 - DNA, 135 bp, Homo sapiens
attgagtctgtttctcagccatcagaaaaccatggtatccttgttagtaatattacagagtcattgtctaccaaatcacgtggagctgtttaatctgttatgccatattttcaataaacctgaaaacaaacaaaa

SEQ ID NO: 4317 - DNA, 188 bp, Homo sapiens
  misc_feature (1)...(188): n = A,T,C or G
atgtgagggcagagatcacnatcatnnaaggcagatacccggagccaangtggagaggatgaatcccttaaccagcctggaccaatcnaaancacttttgctattanccaggcncatttaatgactgcacttgcccacacaagaccgtctattagtgaagatgaggggaaggaatttcgctgagctgt

1-4. (canceled)

7. A transgenic mouse whose genome comprises a disruption of a gene comprising SEQ ID NO: 11 and wherein said disruption results in enhanced learning and memory in (−/−) mice.
